(19) United States
(12) Patent Application Publication
(10) Pub. No.: US 2014/0186905 A1
(43) Pub. Date: Jul. 3, 2014

(54) BIOTECHNOLOGICAL SYNTHESIS PROCESS OF ORGANIC COMPOUNDS WITH THE AID OF AN ALKL GENE PRODUCT

(71) Applicants: Steffen Schaffer, Herten (DE); Jasmin Gielen, Bochum (DE); Nicole Decker, Recklinghausen (DE); Nicole Kirchner, Recklinghausen (DE); Thomas Haas, Muenster (DE); Markus Poetter, Shanghai (CN); Harald Haeger, Luedinghausen (DE)

(72) Inventors: Steffen Schaffer, Herten (DE); Jasmin Gielen, Bochum (DE); Nicole Decker, Recklinghausen (DE); Nicole Kirchner, Recklinghausen (DE); Thomas Haas, Muenster (DE); Markus Poetter, Shanghai (CN); Harald Haeger, Luedinghausen (DE)

(73) Assignee: Evonik Degussa GmbH, Essen (DE)

(21) Appl. No.: 14/238,576

(22) PCT Filed: Aug. 15, 2012
(86) PCT No.: PCT/EP2012/065933

§ 371 Date: Feb. 12, 2014

(30) Foreign Application Priority Data
Aug. 15, 2011 (DE) 10 2011 110 945.9

(51) Int. Cl. C12P 7/64; C12P 5/02; C12P 13/00

(52) U.S. Cl. CPC C12P 7/649; C12P 7/6409; C12P 13/001; C12P 5/026
USPC 435/128; 435/252.33; 435/134; 435/167

(57) ABSTRACT

Subject matter of the invention is a biotechnological process for the production of organic compounds with the aid of at least one alkL gene product.

### FIELD OF THE INVENTION

[0001] Subject matter of the invention is a biotechnological process for the production of organic compounds with the aid of at least one alkL gene product.

### PRIOR ART

[0002] Fatty acids and their derivatives are currently obtained exclusively from vegetable and animal oils or fats. This has a number of disadvantages:

[0003] As a consequence of the BSE crisis, animal fats in particular are virtually no longer accepted by the customer as raw materials. Vegetable oils which contain short- and medium-chain fatty acids are either not readily available or are produced in tropical regions. Here, the sustainability of the production is open to question in many cases because it may be the case that rainforest is destroyed so as to make the cropping areas available.

[0004] Furthermore, vegetable and animal oils and fats have fatty acid spectra which are specific for the raw material in question, but fixed. The consequence is a coupled production, which may determine the price of a particular fatty acid species. Finally, many of the vegetable oils are simultaneously also foodstuffs so that, under certain circumstances, competition may emerge between the use as a feed stock substance and the use as a foodstuff.

[0005] This is why there is a search for alternative sources and production pathways for fatty acids, and, as a result, a great deal of research effort is currently being invested into the production of fatty acids in, for example, algae, but also in particular in recombinant microorganisms such as, for example, yeasts and bacteria.

[0006] Although a series of technologies are being developed for the production of fatty-acid-based fuels and chemicals from renewable raw materials, in particular carbohydrates, the yields achieved are too low for a meaningful commercial utilization.

[0007] The problem of the invention was to provide a more productive biological process for the production of organic compounds.

### DESCRIPTION OF THE INVENTION

[0008] Surprisingly, it has been found that the coexpression of an alkL gene product in the producing microorganism, which coexpression is described hereinbelow, is capable of solving the problem of the invention.

[0009] Subject matter of the present invention, therefore, are microorganisms which synthesize organic substances and which express alkL at a higher level.

[0010] A further subject matter of the invention is the use of the abovementioned microorganisms for the production of organic substances, and a process for producing organic substances using the microorganisms.

[0011] An advantage of the present invention is that the product inhibition in the production process can be reduced greatly.

[0012] A further advantage is that the space-time yield and the carbon yield of the process are increased in comparison with microorganisms which express no, or less, alkL.

[0013] Yet another advantage of the present invention is that the product concentration in the culture supernatant is increased so as to facilitate efficient work-up.

[0014] Unless otherwise specified, all percentages stated (%) are percent by mass.

[0015] The invention comprises methods for generating recombinant microbial cells which are capable of producing organic substances, such as carboxylic acids and carboxylic acid derivatives, such as, for example, carboxylic acid esters, alkanes, alkan-1-ols, alkan-1-als, alkan-1-amines and 1-alkenes, from unrelated carbon sources.

[0016] The present invention therefore comprises a microorganism which includes a first genetic modification so that it is capable of forming more organic substance from at least one simple carbon source in comparison with its wild type, characterized in that the microorganism includes a second genetic modification so that it forms more alkL gene product in comparison with its wild type.

[0017] In the context of the present invention, the expression “first genetic modification” is understood as meaning at least one genetic modification of the microorganism in which one or more genes have been modified, i.e. increased or reduced, in their expression in comparison with the wild-type strain.

[0018] In the context of the present invention, the expression “simple carbon source” is understood as meaning carbon sources in which, in the carbon skeleton, at least one C—C bond must be broken and/or at least one carbon atom of the simple carbon source must form at least one new bond with at least one carbon atom of another molecule so as to arrive at the carbon skeleton of the “organic substance of which more is formed”.

[0019] In the context of the present invention, the expression “alkL gene product” is understood as meaning proteins which meet at least one of the following two conditions:

1.) the protein is identified as a member of the superfamily of the OmpW proteins (Protein family 3922 in the Conserved Domain Database (CDD) of the National Centre for Biotechnology Information (NCBI)), this assignment being made by an alignment of the amino acid sequence of the protein with the database entries present in the NCBI CDD that had been deposited by 22.03.2010, using the standard search parameters, an E value less than 0.01 and using the algorithm “blastp 2.2.23+”,
2.) in a search for conserved protein domains contained in the amino acid sequence of interest in the NCBI CDD (Version 2.20) by means of RPS-BLAST, the presence of the conserved domain “OmpW, Outer membrane protein W” (COG3047) with an E value less than 1×10⁻⁵ is obtained (a domain hit).

[0020] Preferred organic substances of the present invention are those which have more than one, in particular 3 to 36, preferably 6 to 24, in particular 10 to 18 carbon atoms. The organic substances may be linear, branched, saturated or unsaturated and optionally substituted by other groups.

[0021] It is preferred in accordance with the invention that the organic substance is selected from the group comprising, preferably consisting of,

carboxylic acids, in particular having 3 to 34, preferably having 6 to 22, especially preferably having 6 to 18, carbon atoms,
carboxylic acid esters, in particular having 3 to 34, preferably having 6 to 22, especially preferably having 6 to 18, carbon atoms in the carboxylic acid moiety, in which the alcohol component is derived from methanol, ethanol or other primary alcohols having 3-18 carbon atoms, in particular from methanol and ethanol,
alkanes having 3 to 34, preferably having 6 to 22, especially preferably having 6 to 18, carbon atoms,
alkenes having 3 to 34, preferably having 6 to 22, especially preferably having 6 to 18, carbon atoms,
monohydric alcohols having 3 to 34, preferably having 6 to 22, especially preferably having 6 to 18, carbon atoms,
aldehydes having 3 to 34, preferably having 6 to 22, especially preferably having 6 to 18, carbon atoms,
monovalent amines having 3 to 34, preferably having 6 to 22, especially preferably having 6 to 18, carbon atoms,
and substituted compounds of the above group members, in particular those which carry, as further substituents, one or more hydroxyl, amine, keto, carboxyl, methyl, ethyl, cyclopropyl or epoxy functions, with unsubstituted ones being preferred.

[0022] Especially preferred are the organic substances fatty acids, fatty acid esters, alkan-1-als, alkan-1-ols and alkan-1-amines, alkanes and alkenes, in particular 1-alkenes, where the esters in the abovementioned compounds are preferably those in which the alcohol component is derived from methanol, ethanol or other primary alcohols having 3-18 carbon atoms, in particular from methanol and ethanol.

[0023] The organic substances are especially preferably selected from among fatty acids and fatty acid esters in which the fatty acid component is selected from the group consisting of formic acid, acetic acid, propionic acid, butyric acid, valeric acid, caproic acid, oenanthic acid, caprylic acid, pelargonic acid, capric acid, lauric acid, myristic acid, pentadecanoic acid, palmitic acid, margaric acid, stearic acid, nonadecanoic acid, arachidic acid, behenic acid, lignoceric acid, cerotic acid, montanic acid, melissic acid, undecylenic acid, myristoleic acid, palmitoleic acid, petroselic acid, oleic acid, elaidic acid, vaccenic acid, gadoleic acid, eicosenoic acid, cetoleic acid, erucic acid, nervonic acid, pelargonic acid, linoleic acid, α-linolenic acid, γ-linolenic acid, calendulic acid, punicic acid, α-elaeostearic acid, β-elaeostearic acid, arachidonic acid, timnodonic acid, clupanodonic acid, cervonic acid, vernolic acid, ricinoleic acid

and
their derivatives in the form of corresponding alkan-1-als, alkan-1-ols, alkan-1-amines and, in the case of unsaturated fatty acids, such as, for example, palmitoleic acid, oleic acid, linoleic acid, α-linolenic acid, γ-linolenic acid, also alken-1-als, alken-1-ols, alken-1-amines, and alkanes and alkenes prepared from the abovementioned fatty acids by enzymatic reduction and decarbonylation, and alkenes, in particular 1-alkenes, prepared from the abovementioned fatty acids by enzymatic decarboxylation, if appropriate having further, nonterminal double bonds.

[0024] In this context, the expression “corresponding alkane/alkene-1 compounds” is understood as meaning that the carboxyl group of the fatty acid in question is replaced by a —COH, a —CH₂OH or a —CH₂NH₂.

[0025] If, in the context of the present invention, the following text will describe enzymatic activities which catalyse reactions in which alkanoic acids, alkan-1-als, alkan-1-ols or alkan-1-amines are involved either directly or indirectly, it shall be assumed that alkanoic acids, alkan-1-als, alkan-1-ols or alkan-1-amines which additionally have one or more nonterminal double bonds are, as a rule, included in the abovementioned enzymatic activity.

[0026] Carbohydrates such as, for example, glucose, sucrose, arabinose, xylose, lactose, fructose, maltose, molasses, starch, cellulose and hemicellulose, but also glycerol or very simple organic molecules such as CO₂, CO or synthesis gas may be employed as the carbon source.

[0027] It is preferred in accordance with the invention that, owing to the good genetic accessibility, microorganisms are employed which are selected from the group of the bacteria, especially from the group containing, preferably consisting of, Magnetococcus, Mariprofundus, Acetobacter, Acidiphilium, Afipia, Ahrensia, Asticcacaulis, Aurantimonas, Azorhizobium, Azospirillum, Bartonella, tribocorum, Beijerinckia, Bradyrhizobium, Brevundimonas, subvibrioides, Brucella, Caulobacter, Chelativorans, Citreicella, Citromicrobium, Dinoroseobacter, Erythrobacter, Fulvimarina, Gluconacetobacter, Granulibacter, Hirschia, Hoeflea, Hyphomicrobium, Hyphomonas, Ketogulonicigenium, Labrenzia, Loktanella, Magnetospirillum, Maricaulis, Maritimibacter, Mesorhizobium, Methylobacterium, Methylocystis, Methylosinus, Nitrobacter, Novosphingobium, Oceanibulbus, Oceanicaulis, Oceanicola, Ochrobactrum, Octadecabacter, Oligotropha, Paracoccus, Parvibaculum, Parvularcula, Pelagibaca, Phaeobacter, Phenylobacterium, Polymorphum, Pseudovibrio, Rhodobacter, Rhodomicrobium, Rhodopseudomonas, Rhodospirillum, Roseibium, Roseobacter, Roseomonas, Roseovarius, Ruegeria, Sagittula, Silicibacter, Sphingobium, Sphingomonas, Sphingopyxis, Starkeya, Sulfitobacter, Thalassiobium, Xanthobacter, Zymomonas, Agrobacterium, Rhizobium, Sinorhizobium, Anaplasma, Ehrlichia, Neorickettsia, Orientia, Rickettsia, Wolbachia, Bordetella, Burkholderia, Cupriavidus, taiwanensis, Lautropia, Limnobacter, Polynucleobacter, Raistonia, Chromobacterium, Eikenella, corrodens, Basfia, Kingella, Laribacter, Lutiella, Neisseria, Simonsiella, Achromobacter, Acidovorax, Alicycliphilus, Aromatoleum, Azoarcus, Comamonas, Dechloromonas, Delftia, Gallionella, Herbaspirillum, Herminiimonas, Hylemonella, Janthinobacterium, Leptothrix, Methylibium, Methylobacillus, Methylophilales, Methyloversatilis, Methylovorus, Nitrosomonas, Nitrosospira, Oxalobacter, Parasutterella, Polaromonas, Polaromonas, Pusillimonas, Rhodoferax, Rubrivivax, Sideroxydans, Sutterella, wadsworthensis, Taylorella, Thauera, Thiobacillus, Thiomonas, Variovorax, Verminephrobacter, Anaeromyxobacter, Bdellovibrio, bacteriovorus, Bilophila, Desulfarculus, Desulfatibacillum, Desulfobacca, Desulfobacterium, Desulfobulbus, Desulfococcus, Desulfohalobium, Des ulfitobacterium, Desulfomicrobium, Desulfonatronospira, Desulfotalea, Desulfovibrio, Desulfuromonas, Geobacter, Haliangium, Hippea, Lawsonia, Myxococcus, Pelobacter, Plesiocystis, Sorangium, Stigmatella, Syntrophobacter, Syntrophus, Arcobacter, Caminibacter, Campylobacter, Helicobacter, Nitratifractor, Nitratiruptor, Sulfuricurvum, Sulfurimonas, Sulfurospirillum, Sulfurovum, Wolinella, Buchnera, Blochmannia, Hamiltonella, Regiella, Riesia, Citrobacter, Cronobacter, Dickeya, Edwardsiella, Enterobacter, Erwinia, Escherichia, Klebsiella, Pantoea, Pectobacterium, Proteus, Providencia, Rahnella, Salmonella, Serratia, Shigella, Sodalis, Wigglesworthia, Glossina, Xenorhabdus, Yersinia, Acidithiobacillus, Acinetobacter, Aeromonas, Alcanivorax, Alkalilimnicola, Allochromatium, Alteromonadales, Alteromonas, Baumannia, Beggiatoa, Bermanella, Carsonella, Ruthia, Vesicomyosocius, Cardiobacterium, Chromohalobacter, Colwellia, Congregibacter, Coxiella, Dichelobacter, Endoriftia, Enhydrobacter, Ferrimonas, Francisella, Glaciecola, Hahella, Halomonas, Halorhodospira, Halothiobacillus, Idiomarina, Kangiella, Legionella, Marinobacter, Marinomonas, Methylobacter, Methylococcus, Methylomicrobium, Methylophaga, Moraxella, Moritella, Neptuniibacter, Nitrococcus, Pseudoalteromonas, Psychrobacter, Psychromonas, Reinekea, Rickettsiella, Saccharophagus, Shewanella, Succinatimonas, Teredinibacter, Thioalkalimicrobium, Thioalkalivibrio, Thiomicrospira, Tolumonas, Vibrionales, Actinobacillus, Aggregatibacter, Gallibacterium, Haemophilus, Histophilus, Mannheimia, Pasteurella, Azotobacter, Cellvibrio, Pseudomonas, Aliivibrio, Grimontia, Photobacterium, Photobacterium, Vibrio, Pseudoxanthomonas, Stenotrophomonas, Xanthomonas, Xylella, Borrelia, Brachyspira, Leptospira, Spirochaeta, Treponema, Hodgkinia, Puniceispirillum, Liberibacter, Pelagibacter, Odyssella, Accumulibacter, in particular E. coli, Pseudomonas sp., Pseudomonas fluorescens, Pseudomonas putida, Pseudomonas stutzeri, Acinetobacter sp., Burkholderia sp., Burkholderia thailandensis, cyanobacteria, Klebsiella sp., Klebsiella oxytoca, Salmonella sp., Rhizobium sp. and Rhizobium meliloti, with E. coli being especially preferred.

[0028] Preferred alkL gene products which are present in the microorganisms according to the invention are characterized in that the production of the alkL gene product in the native host is induced by dicyclopropyl ketone; in this context, it is additionally preferred that the alkL gene is expressed as part of a group of genes, for example in a regulon, such as, for example, in an operon.

[0029] alkL gene products which are present in the microorganisms according to the invention are preferably encoded by alkL genes of organisms selected from the group of the Gram-negative bacteria, in particular the group containing, preferably consisting of, Pseudomonas sp., Azotobacter sp., Desulfitobacterium sp., Burkholderia sp., preferably Burkholderia cepacia, Xanthomonas sp., Rhodobacter sp., Ralstonia sp., Delftia sp. and Rickettsia sp., Oceanicaulis sp., Caulobacter sp., Marinobacter sp. and Rhodopseudomonas sp., preferably Pseudomonas putida, Oceanicaulis alexandrii, Marinobacter aquaeolei, in particular Pseudomonas putida GPo1 and P1, Oceanicaulis alexandrii HTCC2633, Caulobacter sp. K31 and Marinobacter aquaeolei VT8.

[0030] In this context, very especially preferred alkL gene products are encoded by the alkL genes from Pseudomonas putida GPo1 and P1, which are shown by SEQ ID No. 1 and SEQ ID No. 29, and proteins with the polypeptide sequence SEQ ID No. 2, SEQ ID No. 30, SEQ ID No. 31, SEQ ID No. 32 or SEQ ID No. 33 or with a polypeptide sequence in which up to 60%, preferably up to 25%, especially preferably up to 15%, particularly up to 10, 9, 8, 7, 6, 5, 4, 3, 2, 1% of the amino acid residues are modified in comparison with SEQ ID No. 2, SEQ ID No. 30, SEQ ID No. 31, SEQ ID No. 32 or SEQ ID No. 33 by deletion, insertion, substitution or a combination thereof and which products still have at least 50%, preferably 65%, especially preferably 80%, in particular more than 90% of the activity of the protein with the respective reference sequence SEQ ID No. 2, SEQ ID No. 30, SEQ ID No. 31, SEQ ID No. 32 or SEQ ID No. 33, where 100% activity of the reference protein is understood as meaning the increase of the activity of the cells used as biocatalyst, that is to say the amount of substance reacted per unit time, based on the cell weight used (units per gram of cell dry weight [U/g CDW]), compared with the activity of the biocatalyst without the presence of the reference protein, more precisely in a system as described in the exemplary embodiments, in which system glucose is reacted in an E. coli cell to give palmitoleic acid. A method of choice for determining the synthesis rate can be found in the exemplary embodiments.

[0031] The definition of the units here is the definition customary in enzyme kinetics: 1 unit of biocatalyst reacts 1 μmol of substrate in one minute to form the product.

1 U=1 μmol/min

[0032] Modifications of amino acid residues of a given polypeptide sequence that do not lead to any substantial changes of the properties and function of the given polypeptide are known to the skilled worker. For instance, some amino acids, for example, can frequently be exchanged for one another without problem; examples of such suitable amino acid substitutions are: Ala for Ser; Arg for Lys; Asn for Gln or His; Asp for Glu; Cys for Ser; Gln for Asn; Glu for Asp; Gly for Pro; His for Asn or Gln; Ile for Leu or Val; Leu for Met or Val; Lys for Arg or Gln or Glu; Met for Leu or Ile; Phe for Met or Leu or Tyr; Ser for Thr; Thr for Ser; Trp for Tyr; Tyr for Trp or Phe; Val for Ile or Leu. Likewise, it is known that modifications, especially at the N- or C-terminus of a polypeptide in the form of, for example, amino acid insertions or deletions, will frequently have no substantial effect on the function of the polypeptide.

[0033] First genetic modification for the synthesis of carboxylic acids, carboxylic acid esters and other carboxylic acid derivatives from a simple carbon source

[0034] According to the invention, the microorganisms include a first genetic modification so that they are capable of forming more organic substance, in particular carboxylic acids and carboxylic acid derivatives, from at least one simple carbon source in comparison with their wild type.

[0035] In this context, it is preferred in accordance with the invention that the first genetic modification is an activity of at least one of the enzymes selected from the group

Eᵢ acyl-ACP (Acyl Carrier Protein) thioesterase, preferably from EC 3.1.2.14 or EC 3.1.2.22, which catalyses the hydrolysis of an acyl-acyl carrier protein thioester,
Eᵢᵢ acyl-CoA (Coenzyme A) thioesterase, preferably from EC 3.1.2.2, EC 3.1.2.18, EC 3.1.2.19, EC 3.1.2.20 or EC 3.1.2.22, which catalyses the hydrolysis of an acyl-coenzyme A thioester,
E_{iib} acyl-CoA (Coenzyme A): ACP (Acyl Carrier Protein) transacylase, which preferably catalyses a reaction in which a CoA thioester is converted into an ACP thioester,
Eᵢᵢᵢ polyketide synthase, which catalyses a reaction which participates in the synthesis of carboxylic acids and carboxylic acid esters, and
Eᵢᵥ hexanoic acid synthase, a specialized fatty acid synthase of the FAS-I type, which catalyses the synthesis of hexanoic acid from two molecules malonyl-coenzyme A and one molecule acetyl-coenzyme A
which is increased in comparison with the enzymatic activity of the wild type of the microorganism.

[0036] What will now be said on increasing the enzymatic activity in cells applies not only to the increase of the activity of the enzyme Eᵢ to Eᵢᵥ, but also to all of the enzymes mentioned thereafter, whose activity may optionally be increased, and to an increased alkL gene product formation.

[0037] The expression “increased activity of an enzyme” as used hereinabove and in what will be said hereinbelow in the context of the present invention is preferably understood as meaning an increased intracellular activity; this statement also applies to an increased alkl gene product formation.

[0038] In principle, an increase of the enzymatic activity can be achieved by increasing the number of copies of the gene sequence or of the gene sequences which encode the enzyme, using a strong promoter, modifying the codon usage of the gene, increasing in various ways the half-life of the mRNA or of the enzyme, modifying the regulation of expression of the gene or using a gene or allele which encodes a corresponding enzyme with an increased activity, and optionally combining these measures. Microorganisms which are genetically modified in accordance with the invention are generated for example by transformation, transduction, conjugation or a combination of these methods using a vector which contains the desired gene, an allele of this gene or parts thereof, and a promoter which makes possible the expression of the gene. Heterologous expression is made possible, in particular, by integrating the gene or the alleles into the chromosome of the cell or a vector which replicates extrachromosomally.

[0039] An overview over the possibilities of increasing the enzymatic activity in cells with pyruvate carboxylase as example can be found in DE-A-100 31 999, which is herewith incorporated by reference and whose disclosure regarding the possibilities of increasing the enzymatic activity in cells forms part of the disclosure of the present invention.

[0040] The expression of the abovementioned, and all hereinafter mentioned, enzymes and/or genes can be detected in the gel with the aid of one- and two-dimensional protein gel separation followed by optical identification of the protein concentration using suitable evaluation software. If the increase of an enzymatic activity is based exclusively on an increase of the expression of the gene in question, the quantification of the increase of the enzymatic activity can be determined in a simple manner by a comparison of the one- or two-dimensional protein separations between the wild type and the genetically modified cell. A customary method for preparing the protein gels in the case of bacteria and for identifying the proteins is the procedure described by Hermann et al. (Electrophoresis, 22: 1712-23 (2001). The protein concentration can likewise be analysed by Western blot hybridization with an antibody which is specific for the protein to be detected (Sambrook et al., Molecular Cloning: a laboratory manual, 2nd Ed. Cold Spring Harbor Laboratory Press, Cold Spring Harbor, N.Y. USA, 1989) followed by optical evaluation with suitable software for determining the concentration (Lohaus and Meyer (1989) Biospektrum, 5: 32-39; Lottspeich (1999), Angewandte Chemie 111: 2630-2647). This is also always the method of choice when potential products of the reaction catalysed by the enzymatic activity to be determined can be metabolized rapidly in the microorganism or else when the activity in the wild type itself is too low to be able to sufficiently determine the enzymatic activity to be determined with the aid of the product formation.

[0041] Using the above-described methods, it can also be determined whether an observed microorganism forms more alkL gene product in comparison with its wild type.

[0042] The accession numbers mentioned in the context of the present invention correspond to the ProteinBank database entries of the NCBI dated 26.07.2011; as a rule, the version number of the entry is identified here by “.number”, such as, for example, “0.1”.

### Specific Enzymes Eᵢ

[0043] The reaction catalysed by Eᵢ differs from the reaction catalysed by Eᵢᵢ only in that an acyl-coenzyme A thioester is hydrolyse in place of an acyl-acyl carrier protein thioester. It is obvious that many of the enzymes Eᵢ mentioned can, due to the significant secondary activity, also be employed as Eᵢᵢ, and vice versa.

[0044] In cells which are preferred in accordance with the invention, the enzyme Eᵢ is an enzyme which comprises sequences selected from among:

AAC72881.1, ABB71579.1, CAC19934.1, AAC49180.1 (encoded by SEQ ID No.: 10), AAC49783.1, AAC49179.1, CAB60830.1, ABB71581.1, AAC49269.1, CAC 19933.1, CAA54060.1, AAC72882.1, Q39513.1, AAC49784.1, ABO38558.1, ABO38555.1, ABO38556.1, ABO38554.1, ADB79568.1, ADB79569.1, ACQ57188.1, ACQ57189.1, ABK96561.1, ACQ63293.1, ACQ57190.1, Q9SQI3.1, ABU96744.1, ABC47311.1, XP_{—}002324962.1, AAD01982.1, AAB51525.1, ACV40757.1, XP_{—}002309244.1, CBI28125.3, ABD91726.1, XP_{—}002284850.1, XP_{—}002309243.1, XP_{—}002515564.1, ACR56792.1, ACR56793.1, XP_{—}002892461.1, ABI18986.1, NP_{—}172327.1, CAA85387.1, CAA85388.1, ADA79524.1, ACR56795.1, ACR56794.1, CAN81819.1, ACF17654.1, AAB71729.1, ABH11710.1, ACQ57187.1, AAX51637.1, AAB88824.1, AAQ08202.1, AAB71731.1, AAX51636.1, CAC80370.1, CAC80371.1, AAG43858.1, ABD83939.1, AAD42220.2, AAG43860.1, AAG43861.1, AAG43857.1, AAL15645.1, AAB71730.1, NP_{—}001068400.1, EAY86877.1, NP_{—}001056776.1, XP_{—}002436457.1, NP_{—}001149963.1, ACN27901.1, EAY99617.1, ABL85052.1, XP_{—}002437226.1, NP_{—}001151366.1, ACF88154.1, NP_{—}001147887.1, XP_{—}002453522.1, BAJ99650.1, EAZ37535.1, EAZ01545.1, AAN 17328.1, EAY86884.1, EEE57469.1, Q41635.1, AAM09524.1, Q39473.1, NP_{—}001057985.1, AAC49001.1, XP_{—}001752161.1, XP_{—}001770108.1, XP_{—}001784994.1, XP_{—}002318751.1, NP_{—}001047567.1, XP_{—}002322277.1, XP_{—}002299627.1, XP_{—}002511148.1, CBI 15695.3, XP_{—}002299629.1, XP_{—}002280321.1, CAN60643.1, XP_{—}002459731.1, XP_{—}002975500.1, XP_{—}002962077.1, XP_{—}001773771.1, NP_{—}001151014.1, XP_{—}002317894.1, XP_{—}002971008.1, XP_{—}001774723.1, XP_{—}002280147.1, XP_{—}002526311.1, XP_{—}002517525.1, XP_{—}001764527.1, AB120759.1, BAD73184.1, XP_{—}002987091.1, XP_{—}002985480.1, CBI26947.3, ABI20760.1, XP_{—}002303055.1, XP_{—}002885681.1, ADH03021.1, XP_{—}002532744.1, EAY74210.1, EEC84846.1, EEE54649.1, AAG35064.1, AAC49002.1, CAD32683.1, ACF78226.1, BAJ96402.1, XP_{—}002462626.1, NP_{—}001130099.1, XP_{—}002462625.1, ABX82799.3, Q42712.1, NP_{—}193041.1, AAB51524.1, NP_{—}189147.1, ABR18461.1, XP_{—}002863277.1, AAC72883.1, AAA33019.1, CBI40881.3, XP_{—}002262721.1, AAB51523.1, NP_{—}001063601.1, ADB79567.1, AAL77443.1, AAL77445.1, AAQ08223.1, AAL79361.1, CAA52070.1, AAA33020.1, CAA52069.1, XP_{—}001785304.1, CAC39106.1, XP_{—}002992591.1, XP_{—}002968049.1, XP_{—}001770737.1, XP_{—}001752563.1, AAG43859.1, XP_{—}002978911.1, XP_{—}002977790.1, ACB29661.1, XP_{—}002314829.1, XP_{—}002991471.1, EAZ45287.1, XP_{—}002986974.1, EEC73687.1, XP_{—}002312421.1, ACJ84621.1, NP_{—}001150707.1, AAD28187.1, XP_{—}001759159.1, XP_{—}001757193.1, XP_{—}002322077.1, ABE01139.1, XP_{—}002447294.1, AAX54515.1, AAD33870.1, AEM72521.1
in particular
AAC72881.1, ABB71579.1, CAC19934.1, AAC49180.1 (encoded by SEQ ID No.: 10), AAC49783.1, AAC49179.1, CAB60830.1, ABB71581.1, AAC49269.1 (encoded by SEQ ID No.: 8), CAC19933.1, CAA54060.1, AAC72882.1, Q39513.1 (encoded by SEQ ID No.: 9), AAC49784.1, AAC72883.1, Q41635.1, AAC49001.1 (encoded by SEQ ID No.: 37), AEM72521.1 (encoded by SEQ ID No.: 35)
and
proteins with a polypeptide sequence in which up to 60%, preferably up to 25%, especially preferably up to 15%, in particular up to 10, 9, 8, 7, 6, 5, 4, 3, 2, 1% of the amino acid residues are modified in comparison with the abovementioned reference sequences by deletion, insertion, substitution, or a combination thereof and which still have at least 50%, preferably 65%, especially preferably 80%, in particular more than 90%, of the activity of the protein with the corresponding abovementioned reference sequence, where 100% activity of the reference protein is understood as meaning the increase of the activity of the cells used as biocatalyst, that is to say the amount substance reacted per unit time, based on the cell weight used (units per gram of cell dry weight [U/g CDW]), compared with the activity of the biocatalyst without the presence of the reference protein, where activity in this context and in the context of the determination of the activity of the enzyme Eᵢ is generally understood in particular as meaning the hydrolysis of the dodecanoyl-ACP thioester.

[0045] Microorganisms which are preferred according to the invention are those which are obtained when the microorganisms listed hereinbelow, which include a first genetic modification within the meaning of the invention, are employed as the starting point by being provided with the second genetic modification and, if appropriate, with at least one further genetic modification within the meaning of the invention.

[0046] WO2010063031 A2 describes microorganisms which include a first genetic modification so that they are capable of forming more microbial oil from at least one simple carbon source in comparison with their wild type and which are preferably employed according to the invention, in particular in sections [0007] to [0008], [0092] to [0100], [0135] to [0136], [0181] to [0186] and [0204] to [0213] and in the exemplary embodiments 4 to 8. The document also describes enzymes Eᵢ which are preferred according to the invention and their sequences, in particular in sections [0012] to [0013], [0155], [0160] to [0163], [0185] to [0190] and [0197] to [0199], FIG. 12, the exemplary embodiments 4 to 8 and Table 3.

[0047] WO2010063032 A2 describes microorganisms which include a first genetic modification so that they are capable of forming more microbial oil from at least one simple carbon source in comparison with their wild type and which are preferably employed according to the invention, in particular in sections [0007] to [0008], [0092] to [0100], [0135] to [0136], [0181] to [0186] and [0204] to [0213] and in the exemplary embodiments 4 to 8. The document also describes enzymes Eᵢ which are preferred according to the invention and their sequences, in particular in sections [0012] to [0013], [0155], [0160] to [0163], [0185] to [0190] and [0197] to [0199], FIG. 12, the exemplary embodiments 4 to 8 and Table 3.

[0048] WO2011003034 A2 describes microorganisms which include a first genetic modification so that they are capable of forming more fatty acids and fatty acid derivatives, in particular adipic acid, from at least one simple carbon source in comparison with their wild type and which are preferably employed according to the invention, in particular on page 3, second section, to page 7, first section, page 20, second section, to page 22, second section, and on page 156 to page 166, fifth section, and in Claims 1 to 100. The document also describes enzymes Eᵢ which are preferred according to the invention and their sequences, in particular on page 35, third section, and page 36, first section.

[0049] WO2011008565 A1 describes microorganisms which include a first genetic modification so that they are capable of forming more fatty acids and fatty acid derivatives, in particular fatty acids, alkan-1-als, alkan-1-ols, alkanes and fatty acid esters, from at least one simple carbon source in comparison with their wild type and which are preferably employed according to the invention, in particular in sections [0018] to [0024] and [0086] to [0102] and in the exemplary embodiments 2, 4, 7, 9 and 10. The document also describes enzymes Eᵢ which are preferred according to the invention and their sequences, in particular in sections [0009] to [0018] and [0073] to [0082], FIGS. 1 to 3 and 7, Table 4, the exemplary embodiments 1 to 10 and Claims 1 to 5 and 11 to 13.

[0050] WO2009076559 A1 describes microorganisms which include a first genetic modification so that they are capable of forming more fatty acids and fatty acid derivatives, in particular fatty acids, alkan-1-ols, alkanes or alkenes, from at least one simple carbon source in comparison with their wild type and which are preferably employed according to the invention, in particular in sections [0013] to [0051] and [0064] to [00111] and in Claims 1 to 10. The document also describes enzymes Eᵢ which are preferred according to the invention and their sequences, in particular in Table 1, sections [0021], [0024] to [0030] and [0064] to [00111] and FIG. 6.

[0051] WO2010017245 A1 describes microorganisms which include a first genetic modification so that they are capable of forming more fatty acids and fatty acid derivatives from at least one simple carbon source in comparison with their wild type and which are preferably employed according to the invention, in particular in sections [0011] to [0015] and [00114] to [00134], in the exemplary embodiment 3 and in Claims 1 to 2 and 9 to 11. The document also describes enzymes Eᵢ which are preferred according to the invention and their sequences, in particular in Tables 1, 2 and 3, sections [0080] to [00112] and Claims 3 to 8.

[0052] WO2010127318 A2 describes microorganisms which include a first genetic modification so that they are capable of forming more fatty acids and fatty acid derivatives, in particular biodiesel equivalents and other fatty acid derivatives, mainly fatty acid ethyl esters, fatty acid esters, wax esters, alkan-1-ols and alkan-1-als, from at least one simple carbon source in comparison with their wild type and which are preferably employed in accordance with the invention, in particular on pages 1 to 9 and 11 to 16, exemplary embodiments 1, 2 and 4, FIGS. 1A to 1E and Claims 23 to 43, 62 to 79 and 101 to 120. The document also describes enzymes Eᵢ which are preferred according to the invention and their sequences, in particular on pages 17, 19 to 23.

[0053] WO2008100251 A1 describes microorganisms which include a first genetic modification so that they are capable of forming more fatty acids and fatty acid derivatives, in particular fatty acid esters, wax esters and alkan-1-ols, from at least one simple carbon source in comparison with their wild type and which are preferably employed in accordance with the invention, in particular on pages 4 to 7 and 45 to 46, FIGS. 1A to 1E and Claims 9 to 13. The document also describes enzymes Eᵢ which are preferred according to the invention and their sequences, in particular on pages 4 to 5 and 45 to 46.

[0054] WO2007136762 A2 describes microorganisms which include a first genetic modification so that they are capable of forming more fatty acids and fatty acid derivatives, in particular fatty acid esters, wax esters, hydrocarbons and alkan-1-ols, from at least one simple carbon source in comparison with their wild type and which are preferably employed according to the invention, in particular on pages 2 to 4 and 17 to 18, Table 7, FIGS. 2 to 4, exemplary embodiments 2 to 8 and Claims 13 and 35. The document also describes enzymes Eᵢ which are preferred according to the invention and their sequences, in particular on pages 17 to 18, in Tables 1, 7, 8 and 10 and in FIG. 10.

[0055] WO2008113041 A2 describes microorganisms which include a first genetic modification so that they are capable of forming more fatty acids and fatty acid derivatives, in particular fatty acid esters, wax esters, hydrocarbons, aliphatic ketones and alkan-1-ols, from at least one simple carbon source in comparison with their wild type and which are preferably employed according to the invention, in particular on pages 35 to 41 and 64 to 67, FIG. 2, exemplary embodiments 6 and 10 and Claims 7 and 36. The document also describes enzymes Eᵢ which are preferred according to the invention and their sequences, in particular in FIG. 7 and exemplary embodiments 6 and 10.

[0056] WO2010126891 A1 describes microorganisms which include a first genetic modification so that they are capable of forming more fatty acids and fatty acid derivatives, in particular fatty acid esters, wax esters and alkan-1-ols, from at least one simple carbon source in comparison with their wild type and which are preferably employed according to the invention, in particular in sections [0034] to [0091], [0195] to [0222] and [0245] to [0250], FIGS. 3 to 5 and the exemplary embodiments 1 to 5. The document also describes enzymes Eᵢ which are preferred according to the invention and their sequences, in particular in sections [0245] to [0250], Table 1 and exemplary embodiments 1 to 5.

[0057] WO2010118410 A1 describes microorganisms which include a first genetic modification so that they are capable of forming more fatty acids and fatty acid derivatives, in particular fatty acid esters and wax esters, from at least one simple carbon source in comparison with their wild type and which are preferably employed according to the invention, in particular in sections [0022] to [0043], [0158] to [0197], FIGS. 1 to 4, exemplary embodiments 3 and 5 to 8 and Claims 1 to 53 and 82 to 100. The document also describes enzymes Eᵢ which are preferred according to the invention and their sequences, in particular in sections [0158] to [0197], Table 1, FIGS. 3 and 4 and exemplary embodiments 3 and 5 to 8.

[0058] WO2010118409 A1 describes microorganisms which include a first genetic modification so that they are capable of forming more fatty acids and fatty acid derivatives, in particular fatty acid esters and wax esters, from at least one simple carbon source in comparison with their wild type and which are preferably employed according to the invention, in particular in sections [0134] to [0154], FIGS. 1 to 3 and 6 and exemplary embodiment 3. The document also describes enzymes Eᵢ which are preferred according to the invention and their sequences, in particular in sections [0134] to [0154], FIGS. 3 and 6 and the exemplary embodiment 3.

[0059] WO2010075483 A2 describes microorganisms which include a first genetic modification so that they are capable of forming more fatty acids and fatty acid derivatives, in particular fatty acids, fatty acid methyl esters, fatty acid ethyl esters, alkan-1-ols, fatty alkyl acetates, alkan-1-als, fatty amines, fatty amides, fatty sulphates, fatty ethers, ketones, alkanes, internal and terminal olefins, dicarboxylic acids, α,ω-dicarboxylic acids and α,ω-diols, from at least one simple carbon source in comparison with their wild type and which are preferably employed according to the invention, in particular in sections [0061] to [0090] and [0287] to [0367], FIGS. 1, 4 and 5, exemplary embodiments 1 to 38 and Claims 18 to 26. The document also describes enzymes Eᵢ which are preferred according to the invention and their sequences, in particular in sections [0012] to [0060], Tables 7, 17, 26 and 27, FIGS. 1, 44 to 47 and 55 to 59, exemplary embodiments 1 to 38 and Claims 1 to 17.

[0060] WO2010062480 A2 describes microorganisms which include a first genetic modification so that they are capable of forming more fatty acids and fatty acid derivatives, in particular alkan-1-ols, from at least one simple carbon source in comparison with their wild type and which are preferably employed according to the invention, in particular in sections [0022] to [0174] and [0296] to [0330], exemplary embodiments 3 and 5 to 8 and Claims 17 and 24. The document also describes enzymes Eᵢ which are preferred according to the invention and their sequences, in particular in sections [0022] to [0174], Table 1 and exemplary embodiments 3 and 5 to 8.

[0061] WO2010042664 A2 describes microorganisms which include a first genetic modification so that they are capable of forming more fatty acids and fatty acid derivatives, in particular alkan-1-als, from at least one simple carbon source in comparison with their wild type and which are preferably employed according to the invention, in particular in sections [0022] to [0143] and [0241] to [0275], exemplary embodiment 2 and Claims 3 and 9. The document also describes enzymes Eᵢ which are preferred according to the invention and their sequences, in particular in Table 1, FIG. 5 and exemplary embodiment 2.

[0062] WO2011008535 A1 describes microorganisms which include a first genetic modification so that they are capable of forming more fatty acids and fatty acid derivatives, in particular carboxylic acids, hydroxycarboxylic acids and their lactones, from at least one simple carbon source in comparison with their wild type and which are preferably employed according to the invention, in particular in sections [0024] to [0032] and [0138] to [0158] and FIG. 13.

[0063] WO2010022090 A1 describes microorganisms which include a first genetic modification so that they are capable of forming more fatty acids and fatty acid derivatives, in particular fatty acid esters and wax esters, from at least one simple carbon source in comparison with their wild type and which are preferably employed according to the invention, in particular in sections [0022] to [0143] and [0238] to [0275], FIGS. 3 to 5, the exemplary embodiment 2 and Claims 5, 15, 16 and 36. The document also describes enzymes Eᵢ which are preferred according to the invention and their sequences, in particular in Table 1, FIG. 6 and exemplary embodiment 2.

[0064] WO2009140695 A1 describes microorganisms which include a first genetic modification so that they are capable of forming more fatty acids and fatty acid derivatives, in particular hydrocarbons, from at least one simple carbon source in comparison with their wild type and which are preferably employed according to the invention, in particular in sections [0214] to [0248] and exemplary embodiments 22 to 24. The document also describes enzymes Eᵢ which are preferred according to the invention and their sequences, in particular in Table 1, FIG. 40 and exemplary embodiments 22 to 24.

[0065] WO2010021711 A1 describes microorganisms which include a first genetic modification so that they are capable of forming more fatty acids and fatty acid derivatives, in particular fatty acid esters and wax esters, from at least one simple carbon source in comparison with their wild type and which are preferably employed according to the invention, in particular in sections [0009] to [0020] and [0257] to [0317], FIGS. 3 to 5 and 19, exemplary embodiments 2 to 24 and Claims 4, 5 and 30. The document also describes enzymes Eᵢ which are preferred according to the invention and their sequences, in particular in Table 3, FIG. 6 and exemplary embodiments 2 to 24.

[0066] WO2009085278 A1 describes microorganisms which include a first genetic modification so that they are capable of forming more fatty acids and fatty acid derivatives, in particular olefins, from at least one simple carbon source in comparison with their wild type and which are preferably employed according to the invention, in particular in sections [0188] to [0192] and FIG. 10. The document also describes enzymes Eᵢ which are preferred according to the invention and their sequences, in particular in Table 1 and FIG. 10.

[0067] WO2011019858 A1 describes microorganisms which include a first genetic modification so that they are capable of forming more fatty acids and fatty acid derivatives, in particular alkan-1-ols, from at least one simple carbon source in comparison with their wild type and which are preferably employed according to the invention, in particular in sections [0023], [0064] to [0074] and [0091] to [0099], exemplary embodiments 1 to 13, FIG. 1 and Claim 8. The document also describes enzymes Eᵢ which are preferred according to the invention and their sequences, in particular in sections [0085] to [0090], exemplary embodiments 1 to 13 and Table 1.

[0068] WO2009009391 A2 describes microorganisms which include a first genetic modification so that they are capable of forming more fatty acids and fatty acid derivatives, in particular fatty acid esters, wax esters and alkan-1-ols, from at least one simple carbon source in comparison with their wild type and which are preferably employed according to the invention, in particular in sections [0010] to [0019] and [0191] to [0299], FIGS. 3 to 5, exemplary embodiments 2, 4 to 6, 9 to 14, 17 and 19 and Claims 16, 39, 44 and 55 to 59. The document also describes enzymes Eᵢ which are preferred according to the invention and their sequences, in particular in sections [0010] to [0019] and [0191] to [0299], FIG. 9 and exemplary embodiments 2, 4 to 6, 9 to 14, 17 and 19.

[0069] WO2008151149 A2 describes microorganisms which include a first genetic modification so that they are capable of forming more microbial oil from at least one simple carbon source in comparison with their wild type and which are preferably employed according to the invention, in particular in sections [0009], [0015] to [0033], [0053], [0071], [0174] to [0191], [0274] and [0396], Claims 53 to 114, 188 to 206 and 344 to 355 and Tables 1 to 3. The document also describes enzymes Eᵢ which are preferred according to the invention and their sequences, in particular in Table 5.

[0070] WO2008147781 A2 describes microorganisms which include a first genetic modification so that they are capable of forming more fatty acids and fatty acid derivatives, in particular hydrocarbons, olefins and aliphatic ketones, from at least one simple carbon source in comparison with their wild type and which are preferably employed according to the invention, in particular in sections [0147] to [0156], exemplary embodiments 1 to 3, 8, 9 and 14 and Claims 65 to 71. The document also describes enzymes Eᵢ which are preferred according to the invention and their sequences, in particular in exemplary embodiments 1 to 3, 8, 9 and 14.

[0071] WO2008119082 A2 describes microorganisms which include a first genetic modification so that they are capable of forming more fatty acids and fatty acid derivatives, in particular fatty acid esters, wax esters, triglycerides, biodiesel, gasoline, jet fuel and alkan-1-ols, from at least one simple carbon source in comparison with their wild type and which are preferably employed according to the invention, in particular on pages 3 to 5, 8 to 10 and 40 to 77, in FIGS. 4 and 5, exemplary embodiments 2 to 5 and 8 to 18 and Claims 3 to 39 and 152 to 153. The document also describes enzymes Eᵢ which are preferred according to the invention and their sequences, in particular in Table 1, FIG. 1, exemplary embodiments 2 to 5 and 8 to 18 and Claims 124 to 134 and 138 to 141.

[0072] WO2010135624 A2 describes microorganisms which include a first genetic modification so that they are capable of forming more fatty acids and fatty acid derivatives, in particular alkan-1-ols, from at least one simple carbon source in comparison with their wild type and which are preferably employed according to the invention, in particular in sections [0067] to [0083] and [0095] to [0098]. The document also describes enzymes Eᵢ which are preferred according to the invention and their sequences, in particular in sections [0067] to [0083] and [0095] to [0098]. Zheng Z, Gong Q, Liu T, Deng Y, Chen J C and Chen G Q. (Thioesterase II of Escherichia coli plays an important role in 3-hydroxydecanoic acid production. Appl Environ Microbiol. 2004. 70(7):3807-13) describe microorganisms which include a first genetic modification so that they are capable of forming more fatty acids and fatty acid derivatives, in particular fatty acid esters, wax esters and alkan-1-ols, from at least one simple carbon source in comparison with their wild type and which are preferably employed according to the invention, in particular on pages 3808 to 3810 and 3012 and Table 1, 3 and 4. The document also describes enzymes Eᵢ which are preferred according to the invention and their sequences, in particular on pages 3807 and in Table 2.

[0073] Steen E J, Kang Y, Bokinsky G, Hu Z, Schirmer A, McClure A, Del Cardayre S B and Keasling J D (Microbial production of fatty-acid-derived fuels and chemicals from plant biomass. Nature. 2010. 463(7280):559-62) describe microorganisms which include a first genetic modification so that they are capable of forming more fatty acids and fatty acid derivatives, in particular fatty acids and fatty acid esters, from at least one simple carbon source in comparison with their wild type and which are preferably employed according to the invention, in particular on page 559, third section, to page 559, first section. The document also describes enzymes Eᵢ which are preferred according to the invention and their sequences, in particular in supplementary Table 1.

[0074] Lennen R M, Braden D J, West R A, Dumesic J A and Pfleger B F (A process for microbial hydrocarbon synthesis: Overproduction of fatty acids in Escherichia coli and catalytic conversion to alkanes. Biotechnol Bioeng. 2010. 106(2):193-202) describe microorganisms which include a first genetic modification so that they are capable of forming more fatty acids and fatty acid derivatives, in particular fatty acids and fatty acid esters, from at least one simple carbon source in comparison with their wild type and which are preferably employed according to the invention, in particular on page 193, first section, page 194, first and second section, page 195, second section to page 197, second section, page 198, second section to page 199, third section. The document also describes enzymes Eᵢ which are preferred according to the invention and their sequences, in particular on page 193, first section, page 194, first and second section, page 196, second section, and in supplementary material.

[0075] Liu T, Vora H and Khosla C. (Quantitative analysis and engineering of fatty acid biosynthesis in E. coli. Metab Eng. 2010 July; 12(4):378-86.) describe microorganisms which include a first genetic modification so that they are capable of forming more fatty acids and fatty acid derivatives, in particular fatty acids and fatty acid esters, from at least one simple carbon source in comparison with their wild type and which are preferably employed according to the invention, in particular in sections 2.2 and 3.1 and in Table 1 and 2. The document also describes enzymes Eᵢ which are preferred according to the invention and their sequences, in particular in Table 1.

[0076] Yuan L, Voelker T A and Hawkins D J. (Modification of the substrate specificity of an acyl-acyl carrier protein thioesterase by protein engineering. Proc Natl Acad Sci USA. 1995 Nov. 7; 92(23):10639-43) describe microorganisms which include a first genetic modification so that they are capable of forming more fatty acids and fatty acid derivatives, in particular fatty acids and fatty acid esters, from at least one simple carbon source in comparison with their wild type and which are preferably employed according to the invention, in particular on page 10641, fourth section, and in FIG. 2 and Table 1. The document also describes enzymes Eᵢ which are preferred according to the invention and their sequences, in particular on page 10639, first section, page 10640, second, third and last section, page 10641, second and third section, and in FIG. 1 and Table 1 and 2.

[0077] Lu X, Vora H and Khosla C. (Overproduction of free fatty acids in E. coli: implications for biodiesel production. Metab Eng. 2008. 10(6):333-9.) describe microorganisms which include a first genetic modification so that they are capable of forming more fatty acids and fatty acid derivatives, in particular fatty acids and fatty acid esters, from at least one simple carbon source in comparison with their wild type and which are preferably employed according to the invention in particular on page 334, second section, sections 2.2, 2.3 and 3 (first to fourth section) and in Table 1. The document also describes enzymes Eᵢ which are preferred according to the invention and their sequences, in particular in section 2.2.

[0078] Liu X, Sheng J and Curtiss IIII R. (Fatty acid production in genetically modified cyanobacteria. Proc Natl Acad Sci USA. 2011. 108(17):6899-904) describe microorganisms which include a first genetic modification so that they are capable of forming more fatty acids and fatty acid derivatives, in particular fatty acids and fatty acid esters, from at least one simple carbon source in comparison with their wild type and which are preferably employed according to the invention, in particular on page 6899, fourth and last section, page 6900, first to penultimate section, and in Table S1 of the “Supporting Information”. The document also describes enzymes Eᵢ which are preferred according to the invention and their sequences, in particular on page 6899, sixth and last section.

### Specific Enzymes Eᵢᵢ

[0079] Microorganisms which are preferred according to the invention are those which are obtained when the microorganisms listed hereinbelow, which include a first genetic modification within the meaning of the invention, are employed as the starting point by being provided with the second genetic modification and, if appropriate, with at least one further genetic modification within the meaning of the invention.

[0080] Steen E J, Kang Y, Bokinsky G, Hu Z, Schirmer A, McClure A, Del Cardayre S B and Keasling J D (Microbial production of fatty-acid-derived fuels and chemicals from plant biomass. Nature. 2010. 463(7280):559-62) describe microorganisms which include a first genetic modification so that they are capable of forming more carboxylic acids and carboxylic acid esters, in particular fatty acids and fatty acid esters, from at least one simple carbon source in comparison with their wild type and which are preferably employed according to the invention, in particular on page 559, third section, to page 559, first section. The document also describes enzymes Eᵢᵢ which are preferred according to the invention and their sequences, in particular in supplementary Table 1.

[0081] Lennen R M, Braden D J, West R A, Dumesic J A and Pfleger B F (A process for microbial hydrocarbon synthesis: Overproduction of fatty acids in Escherichia coli and catalytic conversion to alkanes. Biotechnol Bioeng. 2010. 106(2):193-202) describe microorganisms which include a first genetic modification so that they are capable of forming more carboxylic acids and carboxylic acid esters, in particular fatty acids and fatty acid esters, from at least one simple carbon source in comparison with their wild type and which are preferably employed according to the invention, in particular on page 193, first section, page 194, first and second section, page 195, second section to page 197, second section, page 198, second section to page 199, third section. The document also describes enzymes Eᵢᵢ which are preferred according to the invention and their sequences, in particular on page 193, first section, page 194, first and second section, page 196, second section, and in supplementary material. Liu T, Vora H and Khosla C. (Quantitative analysis and engineering of fatty acid biosynthesis in E. coli. Metab Eng. 2010 July; 12(4):378-86.) describe microorganisms which include a first genetic modification so that they are capable of forming more carboxylic acids and carboxylic acid esters, in particular fatty acids and fatty acid esters, from at least one simple carbon source in comparison with their wild type and which are preferably employed according to the invention, in particular in sections 2.2 and 3.1 and in Table 1 and 2. The document also describes enzymes Eᵢᵢ which are preferred according to the invention and their sequences, in particular in Table 1.

[0082] Yuan L, Voelker T A and Hawkins D J. (Modification of the substrate specificity of an acyl-acyl carrier protein thioesterase by protein engineering. Proc Natl Acad Sci USA. 1995 Nov. 7; 92(23):10639-43) describe microorganisms which include a first genetic modification so that they are capable of forming more carboxylic acids and carboxylic acid esters, in particular fatty acids and fatty acid esters, from at least one simple carbon source in comparison with their wild type and which are preferably employed according to the invention, in particular on page 10641, fourth section, and in FIG. 2 and Table 1. The document also describes enzymes Eᵢᵢ which are preferred according to the invention and their sequences, in particular on page 10639, first section, page 10640, second, third and last section, page 10641, second and third section, and in FIG. 1 and Table 1 and 2.

[0083] Lu X, Vora H and Khosla C. (Overproduction of free fatty acids in E. coli: implications for biodiesel production. Metab Eng. 2008. 10(6):333-9.) describe microorganisms which include a first genetic modification so that they are capable of forming more carboxylic acids and carboxylic acid esters, in particular fatty acids and fatty acid esters, from at least one simple carbon source in comparison with their wild type and which are preferably employed according to the invention in particular on page 334, second section, sections 2.2, 2.3 and 3 (first to fourth section) and in Table 1. The document also describes enzymes Eᵢᵢ which are preferred according to the invention and their sequences, in particular in section 2.2.

[0084] Liu X, Sheng J and Curtiss IIII R. (Fatty acid production in genetically modified cyanobacteria. Proc Natl Acad Sci USA. 2011. 108(17):6899-904) describe microorganisms which include a first genetic modification so that they are capable of forming more carboxylic acids and carboxylic acid esters, in particular fatty acids and fatty acid esters, from at least one simple carbon source in comparison with their wild type and which are preferably employed according to the invention, in particular on page 6899, fourth and last section, page 6900, first to penultimate section, and in Table S1 of the “Supporting Information”. The document also describes enzymes Eᵢᵢ which are preferred according to the invention and their sequences, in particular on page 6899, sixth and last section.

### Specific Enzymes Eᵢᵢᵢ

[0085] Microorganisms which are preferred according to the invention are those which are obtained when the microorganisms listed hereinbelow, which include a first genetic modification within the meaning of the invention, are employed as the starting point by being provided with the second genetic modification and, if appropriate, with at least one further genetic modification within the meaning of the invention.

[0086] WO2009121066 A1 describes microorganisms which include a first genetic modification so that they are capable of forming more fatty acids and fatty acid derivatives, in particular dicarboxylic acids, from at least one simple carbon source in comparison with their wild type and which are preferably employed according to the invention, in particular in Claims 8 to 14. The document also describes enzymes Eᵢᵢᵢ which are preferred according to the invention and their sequences, in particular in sections [00026] to [0054], in exemplary embodiments 1 to 6, FIGS. 4 to 10 and Claims 1 to 7.

[0087] WO2009134899 A1 describes microorganisms which include a first genetic modification so that they are capable of forming more fatty acids and fatty acid derivatives, in particular carboxylic acids, hydroxycarboxylic acids and their lactones, from at least one simple carbon source in comparison with their wild type and which are preferably employed according to the invention, in particular in sections [0079] to [0082], exemplary embodiment 1 and Claim 20. The document also describes enzymes Eᵢᵢᵢ which are preferred according to the invention and their sequences, in particular in sections [0009] to [0010] and [0044] to [0078], exemplary embodiment 1, FIGS. 1 and 5 to 8 and Claims 15 to 17 and 19.

### Specific Enzymes Eᵢᵥ

[0088] In cells which are preferred according to the invention, the enzyme Eᵢᵥ is one which comprises sequences selected from among:

AAS90071.1, XP_{—}002379948.1, AAS90024.1, XP_{—}001821514.2, BAE59512.1, AAL99898.1, AAS90001.1, AAS90049.1, XP_{—}001911518.1, ACH72901.1, XP_{—}681084.1, AAC49198.1, EFW18013.1, XP_{—}003070494.1, XP_{—}001241401.1, XP_{—}002384449.1, XP_{—}001827206.1, XP_{—}002836001.1, XP_{—}001393196.1, XP_{—}660984.1, XP_{—}001395284.1, XP_{—}002148677.1, XP_{—}001827151.2, BAE66018.1, XP_{—}001217254.1, CAK40139.1, XP_{—}001393516.2, XP_{—}002477829.1, XP_{—}002146311.1, XP_{—}002340042.1, XP_{—}002544942.1, CBF87553.1, XP_{—}002149766.1, 2UV8_A, XP_{—}682676.1, CBX98966.1, XP_{—}002560069.1, XP_{—}001273102.1, P15368.1, XP_{—}001273530.1, CBX99714.1, AAB41493.1, XP_{—}001823764.1, XP_{—}001388458.1, XP_{—}748738.1, EDP53207.1, XP_{—}001259179.1, XP_{—}001825741.2, BAE64608.1, XP_{—}001213437.1, XP_{—}002377327.1, XP_{—}002152724.1, EFZ04065.1, XP_{—}001792784.1, EGP89632.1, XP_{—}001407660.1, EFQ31023.1, XP_{—}003040066.1, 2UV9_A, XP_{—}002486436.1, XP_{—}001585982.1, EFY87204.1, XP_{—}002620504.1, XP_{—}003295647.1, EEQ86108.1, XP_{—}001938586.1, XP_{—}001547465.1, XP_{—}001906653.1, XP_{—}001402457.2, CAK40502.1, XP_{—}002568116.1, XP_{—}003230922.1, XP_{—}001647236.1, XP_{—}385497.1, EGD94294.1, EGE05134.1, XP_{—}002849847.1, XP_{—}003015737.1, EFX06093.1, XP_{—}003019052.1, EEH03423.1, XP_{—}001942351.1, EGC45478.1, XP_{—}002556020.1, XP_{—}003011025.1, CAY86729.1, EDN60916.1, EGA84463.1, EGA56454.1, EEU05652.1, NP_{—}015093.1, XP_{—}003231214.1, XP_{—}445956.1, EGA60201.1, XP_{—}003349949.1, XP_{—}003070417.1, XP_{—}001241314.1, EGR48038.1, XP_{—}002615278.1, EFW 15042.1, EGO59647.1, XP_{—}452914.1, XP_{—}962466.1, XP_{—}001537327.1, XP_{—}002796517.1, XP_{—}003305240.1, XP_{—}002543037.1, XP_{—}002499262.1, NP_{—}985412.2, XP_{—}003019770.1, EFW96269.1, XP_{—}002843350.1, EEH43965.1, XP_{—}457388.1, XP_{—}001799391.1, EEH21370.1, BAD08376.1, XP_{—}001486434.1, BAF79876.1, EFY90998.1, XP_{—}001939431.1, EER44845.1, EFZ02060.1, XP_{—}001386834.2, XP_{—}501096.1, XP_{—}003299758.1, XP_{—}002419391.1, XP_{—}002490414.1, ACZ66251.1, XP_{—}002548204.1, P43098.1, XP_{—}002176039.1, XP_{—}002479407.1, EEQ44526.1, AAA34601.1, XP_{—}001791764.1, XP_{—}003009337.1, BAA11913.1, NP_{—}593823.1, BAB62031.1, BAB62032.1, BAB62030.1, 2 PFF_A, XP_{—}380212.1, ADN94478.1, EGF83443.1, XP_{—}681149.1, EGG00662.1, ADN94479.1, ABC94883.1, XP_{—}571099.1, EFY94095.1, EFW39589.1, XP_{—}003194430.1, XP_{—}003031600.1, XP_{—}001836417.1, XP_{—}001880844.1, XP_{—}762607.1, EGN98830.1, EGO24420.1, ACD87451.1, XP_{—}003328630.1, XP_{—}002997955.1, CCA25392.1, XP_{—}002901724.1, EFY86381.1, XP_{—}002901728.1, ADN97213.1, XP_{—}759118.1, XP_{—}003325251.1, XP_{—}003169619.1, XP_{—}002555446.1, ABJ98780.1, XP_{—}723161.1, EDZ68993.1, XP_{—}001526334.1, XP_{—}001223165.1, YP_{—}889015.1, AAO43178.1, YP_{—}001702252.1, XP_{—}003026305.1, YP_{—}003659808.1, ZP_{—}08155637.1, ZP_{—}04749666.1, ZP_{—}08022190.1, YP_{—}004007770.1, YP_{—}954908.1, YP_{—}004522637.1, YP_{—}640811.1, ZP_{—}04448562.1, NP_{—}301868.1, ZP_{—}06851996.1, YP_{—}003273140.1, YP_{—}001071929.1, YP_{—}001133797.1, YP_{—}004076455.1, YP_{—}701403.1, ZP_{—}03324816.1, YP_{—}002778327.1, ZP_{—}02028077.1, YP_{—}909119.1, YP_{—}880884.1, YP_{—}002767320.1, NP_{—}961266.1, ZP_{—}07457010.1, ZP_{—}08206945.1, ZP_{—}02917151.1, ZP_{—}04387794.1, YP_{—}003359863.1, EGO39886.1, ABE96385.1, ZP_{—}05228143.1, ZP_{—}06522069.1, EGL13180.1, ZP_{—}06976698.1, YP_{—}001852225.1, ZP_{—}06596502.1, YP_{—}907384.1, ZP_{—}06518033.1, AEF27803.1, YP_{—}003374392.1, ZP_{—}07485570.1, NP_{—}217040.1, ZP_{—}03742148.1, NP_{—}856198.1, YP_{—}004724192.1, NP_{—}337093.1, AEJ51135.1, ZP_{—}05765008.1, YP_{—}004745991.1, AEJ47516.1, ZP_{—}06927266.1, ZP_{—}03646962.1, AEF31807.1, YP_{—}003939358.1, YP_{—}003971698.1, YP_{—}003986333.1, ZP_{—}05750911.1, ADD61451.1, ZP_{—}07942485.1, YP_{—}004209716.1, YP_{—}004221489.1, AEI96705.1, NP_{—}696693.1, AEG82252.1, YP_{—}004001156.1, ZP_{—}03976473.1, ZP_{—}04663991.1, ZP_{—}00121397.1, YP_{—}003662064.1, YP_{—}003646283.1, YP_{—}004630447.1, YP_{—}002323720.1, YP_{—}002835610.1, YP_{—}117466.1, ZP_{—}02963252.1, ADC85342.1, NP_{—}940183.1, NP_{—}739002.1, ZP_{—}06755645.1, ADL21513.1, YP_{—}003784047.1, ADL11108.1, ZP_{—}06608499.1, ZP_{—}07967121.1, ZP_{—}05966223.1, ZP_{—}08682531.1, ZP_{—}03918327.1, ZP_{—}07879655.1, ZP_{—}03972703.1, ZP_{—}06162645.1, ZP_{—}06837277.1, ZP_{—}07990916.1, ZP_{—}03394081.1, CAA46024.1, YP_{—}004760934.1, ZP_{—}06751771.1, ZP_{—}03934033.1, NP_{—}601696.1, BAB99888.1, YP_{—}001139316.1, ZP_{—}03926457.1, NP_{—}737523.1, ZP_{—}02044858.1, ZP_{—}07404023.1, ZP_{—}03709883.1, XP_{—}002388648.1, ZP_{—}07402466.1, ZP_{—}03710807.1, ZP_{—}08294093.1, ZP_{—}08232611.1, XP_{—}682514.1, ZP_{—}06837028.1, YP_{—}001137826.1, CAA61087.1, ZP_{—}06043461.1, YP_{—}002833817.1, YP_{—}225128.1, NP_{—}600065.1, ABU23831.1, ZP_{—}07716892.1, ZP_{—}03935133.1, ZP_{—}02549600.1, ZP_{—}05215994.1, YP_{—}004494858.1, XP_{—}001526333.1, AAS90085.1, XP_{—}002379947.1, AAS90025.1, XP_{—}001821515.1, AAL99899.1, AAS90002.1, AAS90050.1, XP_{—}001911517.1, ACH72900.1, XP_{—}681083.1, AAC49199.1, XP_{—}003070495.1, XP_{—}001241402.1, EFW18012.1, CBX98970.1, EEH03422.1, EEQ86107.1, EGC45479.1, XP_{—}002620503.1, XP_{—}001537328.1, XP_{—}002796516.1, 2UVA_G, EEH43966.1, DAA05950.1, EGR47893.1, XP_{—}003070418.1, XP_{—}001241316.1, XP_{—}001827193.1, XP_{—}002384436.1, XP_{—}682677.1, XP_{—}002486435.1, EGP88608.1, EDP53206.1, XP_{—}001259180.1, EEH21369.1, XP_{—}002543038.1, XP_{—}748739.1, XP_{—}003015735.1, EGE05135.1, XP_{—}002152723.1, XP_{—}002560068.1, XP_{—}001273529.1, XP_{—}003230923.1, EFX05327.1, XP_{—}003019051.1, XP_{—}001585981.1, XP_{—}361644.2, XP_{—}001223166.1, XP_{—}003349948.1, XP_{—}002380737.1, AAB41494.1, XP_{—}001823765.1, XP_{—}962465.1, EGO59648.1, XP_{—}001906652.1, XP_{—}003039864.1, XP_{—}001213436.1, XP_{—}385498.1, XP_{—}003295646.1, EFQ31022.1, XP_{—}002849848.1, XP_{—}002148679.1, CBX99715.1, XP_{—}002149767.1, EFY87205.1, EFZ04064.1, XP_{—}002340041.1, EGD94295.1, XP_{—}001938587.1, CAK45758.1, XP_{—}001792785.1, XP_{—}001393189.2, XP_{—}003169620.1, XP_{—}001547461.1, XP_{—}001217253.1, XP_{—}001939430.1, BAA92930.1, Q92215.1, EDK38075.2, EFW97345.1, XP_{—}002495511.1, XP_{—}451653.1, XP_{—}500912.1, CAA42211.1, XP_{—}001486502.1, XP_{—}002477835.1, XP_{—}445436.1, NP_{—}594370.1, XP_{—}001827152.2, BAE66019.1, BAA36384.1, BAB62141.1, XP_{—}003299759.1, XP_{—}002553365.1, XP_{—}002489642.1, 2UV8_G, XP_{—}457311.1, CAY80909.1, XP_{—}001395285.1, EGA61562.1, EDN60099.1, EDV12927.1, NP_{—}012739.1, XP_{—}002616181.1, XP_{—}002420328.1, XP_{—}001524822.1, XP_{—}002550943.1, XP_{—}001386364.2, NP_{—}984945.2, 227846, AAB59310.1, XP_{—}001646561.1, XP_{—}716877.1, XP_{—}001836417.1, XP_{—}002146312.1, P34731.1, EGO24420.1, XP_{—}002544941.1, EFZ02054.1, XP_{—}002175228.1, XP_{—}001393490.2, XP_{—}003031600.1, XP_{—}002479408.1, XP_{—}002568119.1, XP_{—}001825735.2, XP_{—}002377320.1, EGN98830.1, ACD87451.1, XP_{—}001880844.1, XP_{—}571100.1, ABC94882.1, XP_{—}775164.1, BAE64602.1, EFY90992.1, XP_{—}003194424.1, XP_{—}001273103.1, XP_{—}681142.1, XP_{—}003011020.1, AAA34602.1, XP_{—}003231209.1, XP_{—}003019765.1, ADN94478.1, EEQ46070.1, XP_{—}001799393.1, CAK40504.1, AAM75418.1, ADN94479.1, XP_{—}002843356.1, CAA27616.1, XP_{—}380213.1, ADN97213.1, XP_{—}759118.1, XP_{—}762607.1, CAK49094.1, EER44843.1, XP_{—}003009335.1, XP_{—}002997955.1, XP_{—}002901724.1, CCA25392.1, CAK36856.1, XP_{—}001388457.2, ABO37974.1, ABJ98780.1, XP_{—}660985.1, EDZ71063.1, XP_{—}001402459.2, XP_{—}001791765.1, XP_{—}003324647.1, EGG 10429.1, EFW 15039.1, XP_{—}002384390.1, XP_{—}003031976.1, EDZ71062.1, EFW39589.1, ACZ80683.1, XP_{—}002901728.1, XP_{—}003328630.1, XP_{—}681125.1, XP_{—}003325251.1,
and
proteins with a polypeptide sequence in which up to 60%, preferably up to 25%, especially preferably up to 15%, in particular up to 10, 9, 8, 7, 6, 5, 4, 3, 2, 1% of the amino acid residues are modified in comparison with the abovementioned reference sequences by deletion, insertion, substitution, or a combination thereof and which still have at least 50%, preferably 65%, especially preferably 80%, in particular more than 90%, of the activity of the protein with the corresponding abovementioned reference sequence, where 100% activity of the reference protein is understood as meaning the increase of the activity of the cells used as biocatalyst, that is to say the amount of substance reacted per unit time, based on the cell weight used (units per gram of cell dry weight [U/g CDW]), compared with the activity of the biocatalyst without the presence of the reference protein, where activity in this context and in the context of the determination of the activity of the enzyme Eᵢᵥ is generally understood in particular as meaning the conversion into hexanoic acid of two molecules malonyl-coenzyme A and one molecule acetyl-coenzyme A.

[0089] Microorganisms which are preferred according to the invention are those which are obtained when the microorganisms listed hereinbelow, which include a first genetic modification within the meaning of the invention, are employed as the starting point by being provided with the second genetic modification and, if appropriate, with at least one further genetic modification within the meaning of the invention.

[0090] WO2011003034 A2 describes microorganisms which include a first genetic modification so that they are capable of forming more fatty acids and fatty acid derivatives, in particular hexanoic acid, from at least one simple carbon source in comparison with their wild type and which are preferably employed according to the invention, in particular on page 2 to 3, page 5, third section, in exemplary embodiments 1 to 4, 7 to 9 and 12 to 14 and Claims 1 to 100. The document also describes enzymes Eᵢᵥ which are preferred according to the invention and their sequences, in particular on page 5 and in exemplary embodiment 3.

[0091] Hitchman T S, Schmidt E W, Trail F, Rarick M D, Linz J E and Townsend C A. (Hexanoate synthase, a specialized type I fatty acid synthase in aflatoxin B1 biosynthesis. Bioorg Chem.

[0092] 2001. 29(5):293-307) describe microorganisms which include a first genetic modification so that they are capable of forming more fatty acids and fatty acid derivatives, in particular hexanoic acid, from at least one simple carbon source in comparison with their wild type and which are preferably employed according to the invention, in particular on page 296, penultimate section to page 298, second section. The document also describes enzymes Eᵢᵥ which are preferred according to the invention and their sequences, in particular on page 299, fourth section, to page 302, first section.

[0093] In the context of the first genetic modification, it may be beneficial to employ, in place of the enzyme Eᵢ, a combination of the activity increase in comparison with that of the wild type of an enzyme Eᵢᵢ paired with that of an enzyme E_{iib}, which catalyses a reaction in which a CoA thioester is converted into an ACP thioester.

[0094] Such enzymes E_{iib} are known as acyl-CoA (Coenzyme A):ACP (Acyl Carrier Protein) transacylases. Preferred enzymes E_{iib} are selected from among

XP_{—}003402554.1, YP_{—}002908243.1, YP_{—}001778804.1, YP_{—}001670627.1, YP_{—}004703658.1, YP_{—}001747923.1, YP_{—}004348703.1, YP_{—}004352505.1, YP_{—}004379169.1, ADR61731.1, YP_{—}001269622.1, YP_{—}001186851.1, YP_{—}004659609.1, YP_{—}003519049.1, YP_{—}001811696.1, YP_{—}004616040.1, NP_{—}252697.1, NP_{—}252169.1, NP_{—}249421.1, ZP_{—}06456665.1, ZP_{—}01167071.1, ZP_{—}08557569.1, ZP_{—}08554397.1, YP_{—}001157914.1, YP_{—}004475334.1, EGM20156.1, BAK10182.1, YP_{—}347066.1, Q9KJH8.1, YP_{—}002987902.1, ZP_{—}03794633.1, ZP_{—}03627777.1, YP_{—}004434330.1, NP_{—}743567.1, ZP_{—}03456835.1, ZP_{—}07911512.1, ZP_{—}07264431.1, ZP_{—}02265387.2, ZP_{—}03456013.1, ZP_{—}07577798.1, ZP_{—}08429367.1, YP_{—}004055319.1, YP_{—}004053883.1, YP_{—}275219.1, YP_{—}276116.1, YP_{—}003882762.1, EGH97259.1, EGH95622.1, EGH90852.1, EGH85976.1, EGH81248.1, EGH79586.1, EGH79549.1, EGH73565.1, EGH66549.1, EGH64812.1, EGH58099.1, EGH54896.1, EGH50352.1, EGH43364.1, EGH41593.1, EGH29888.1, EGH29417.1, EGH22392.1, EGH22129.1, EGH11618.1, EGH10011.1, ZP_{—}04589662.1, CCA60711.1, YP_{—}003004716.1, BAK16630.1, YP_{—}003264146.1, YP_{—}371314.1, YP_{—}439272.1, NP_{—}762892.1, ADW02533.1, YP_{—}003291774.1, EGC99875.1, ZP_{—}08139631.1, YP_{—}003333890.1, EGC08366.1, YP_{—}080427.1, YP_{—}258557.1, YP_{—}001985016.1, YP_{—}002875182.1, YP_{—}002871082.1, YP_{—}237050.1, YP_{—}236199.1, NP_{—}794008.1, NP_{—}793082.1, YP_{—}609790.1, EFW81598.1, EFW79804.1, ZP_{—}07261632.1, ZP_{—}07229875.1, ZP_{—}06458504.1, ZP_{—}05640568.1, ZP_{—}03399268.1, ZP_{—}03398232.1, ZP_{—}08004496.1, ZP_{—}06876938.1, ZP_{—}03227482.1, ZP_{—}02511781.1, ZP_{—}02503964.1, ZP_{—}02477255.1, ZP_{—}02466678.1, ZP_{—}02465791.1, ZP_{—}02461688.1, ZP_{—}02417235.1, ZP_{—}02414413.1, ZP_{—}02408727.1, ZP_{—}02376540.1, ZP_{—}02358949.1, ZP_{—}07778021.1, ZP_{—}07774051.1, ZP_{—}07795409.1, ZP_{—}07089008.1, YP_{—}776393.1, ZP_{—}07684652.1, ZP_{—}06640022.1, ZP_{—}03054335.1, ZP_{—}02907621.1, ZP_{—}02891475.1, ZP_{—}01862226.1, ZP_{—}01769192.1, ZP_{—}01367441.1, ZP_{—}01366930.1, ZP_{—}01364106.1, ZP_{—}01312991.1, ZP_{—}01173135.1, ZP_{—}07005523.1, ZP_{—}04955702.1, ZP_{—}04943305.1, ZP_{—}04936014.1, ZP_{—}04932415.1, ZP_{—}04930223.1, ZP_{—}04905334.1, ZP_{—}04893870.1, ZP_{—}04893165.1, ZP_{—}04892059.1, ZP_{—}04884056.1, YP_{—}002438575.1, YP_{—}002234939.1, YP_{—}001488024.1, YP_{—}001346487.1, YP_{—}001350135.1, YP_{—}001347031.1, YP_{—}990329.1, YP_{—}860279.1, YP_{—}789111.1, YP_{—}792557.1, YP_{—}623139.1, YP_{—}175644.1, YP_{—}111362.1, YP_{—}110557.1, YP_{—}105231.1, NP_{—}937516.1, AAU44816.1, AAA25978.1, XP_{—}002721010.1, AAK81868.1, AAK71350.1, AAK71349.1, ZP_{—}06499968.1, ZP_{—}06498781.1, YP_{—}003472045.1, ACA03779.1, ABL84756.1, AAQ16175.1, AAT51302.1, AAT51199.1, ZP_{—}05639386.1, ACH70299.1, ACA60824.1, BAB32432.1, in particular AAK81868.1, NP_{—}743567.1, AAK71349.1, YP_{—}001269622.1, ADR61731.1, AAU44816.1, AAQ16175.1, YP_{—}001670627.1, ACH70299.1, Q9KJH8.1, YP_{—}004703658.1, ZP_{—}08139631.1, YP_{—}609790.1, YP_{—}001747923.1, YP_{—}258557.1, YP_{—}347066.1, YP_{—}002871082.1, YP_{—}004352505.1, ACA60824.1, ZP_{—}07774051.1, BAB32432.1, ZP_{—}05640568.1, EGH58099.1, EGH64812.1, EGH11618.1, ZP_{—}06456665.1, YP_{—}276116.1, EFW81598.1, EGH95622.1, EGH22129.1, NP_{—}794008.1, ZP_{—}03399268.1, ZP_{—}07264431.1, EGH73565.1, YP_{—}237050.1, ZP_{—}06498781.1, EGH29888.1, EGH79586.1, EGH35052.1, YP_{—}792557.1, YP_{—}001350135.1, ZP_{—}01364106.1, ZP_{—}04932415.1, NP_{—}249421.1, YP_{—}004379169.1, ACA03779.1, YP_{—}001186851.1, YP_{—}004475334.1, ZP_{—}04589662.1, ZP_{—}03398232.1, EGH10011.1, ZP_{—}07229875.1, ZP_{—}05639386.1, EGH66549.1, YP_{—}275219.1, ZP_{—}07005523.1, EFW79804.1, ZP_{—}06458504.1, EGH85976.1, YP_{—}236199.1, EGH43364.1, ZP_{—}07261632.1, ZP_{—}06499968.1, EGH29417.1, EGH54896.1, EGH22392.1, EGH97259.1, NP_{—}793082.1, EGH90852.1, EGH41593.1, NP_{—}252169.1, ZP_{—}01366930.1, YP_{—}001347031.1, ZP_{—}07778021.1, YP_{—}002875182.1, AAA25978.1, ABL84756.1, EGH81248.1, ZP_{—}07795409.1 and especially preferably AAU44816.1, NP_{—}743567.1, YP_{—}001269622.1, ADR61731.1, AAK71349.1, YP_{—}001670627.1, AAK81868.1, AAQ16175.1, Q9KJH8.1, ACH70299.1, YP_{—}004703658.1, ZP_{—}08139631.1, YP_{—}609790.1, YP_{—}001747923.1, AAK71350.1,
and
proteins with a polypeptide sequence in which up to 60%, preferably up to 25%, especially preferably up to 15%, in particular up to 10, 9, 8, 7, 6, 5, 4, 3, 2, 1% of the amino acid residues are modified in comparison with the abovementioned reference sequences by deletion, insertion, substitution, or a combination thereof and which still have at least 50%, preferably 65%, especially preferably 80%, in particular more than 90%, of the activity of the protein with the corresponding abovementioned reference sequence, where 100% activity of the reference protein is understood as meaning the increase of the activity of the cells used as biocatalyst, that is to say the amount of substance reacted per unit time, based on the cell weight used (units per gram of cell dry weight [U/g CDW]), compared with the activity of the biocatalyst without the presence of the reference protein, where activity in this context and in the context of the determination of the activity of the enzyme E_{iib} is generally understood in particular as meaning the conversion of dodecanoyl-CoA thioester into dodecanoyl-ACP thioester.
Third Genetic Modification for the Production of Carboxylic Acid Esters from a Simple Carbon Source

[0095] It is advantageous in particular for the production of carboxylic acid esters when the microorganism additionally includes a third genetic modification which comprises an activity of at least one of the enzymes E_{iib}, Eᵥ, Eᵥᵢ, or Eᵥᵢᵢ which is increased in comparison with the enzymatic activity of the wild type of the microorganism.

[0096] In this context, it is preferred according to the invention that this genetic modification is an activity of at least one of the enzymes selected from the group

E_{iib} acyl-CoA (Coenzyme A):ACP (Acyl Carrier Protein) transacylase, which converts an ACP thioester into a CoA thioester or a CoA thioester into an ACP thioester,
Eᵥ wax ester synthase or alcohol O-acyltransferase, preferably of EC 2.3.1.75 or EC 2.3.1.84, which catalyses the synthesis of an ester from an acyl-coenzyme A thioester or an ACP thioester and an alcohol,
Eᵥₐ fatty acid O-methyl transferase, preferably of EC 2.1.1.15, which catalyses the synthesis of a fatty acid methyl ester from a fatty acid and S-adenosylmethionine,
Eᵥᵢ acyl-CoA (Coenzyme A) synthetase, preferably of EC 6.2.1.3, which catalyses the synthesis of an acyl-coenzyme A thioester, and
Eᵥᵢᵢ acyl thioesterase, preferably of EC 3.1.2.2, EC 3.1.2.4, EC 3.1.2.18, EC 3.1.2.19, EC 3.1.2.20 or EC 3.1.2.22, which catalyses the conversion of an acyl thioester with an alcohol to give a carboxylic acid ester,
which is increased in comparison with the enzymatic activity of the wild type of the microorganism.

[0097] In this context, it is especially preferred that the third genetic modification comprises combinations of the increased activities of the enzymes selected from among Eᵥ, Eᵥₐ, Eᵥᵢᵢ, EᵥₐEᵥᵢᵢ, EᵥEᵥᵢ, EᵥᵢEᵥᵢᵢ, EᵥᵢEᵥᵢᵢE_{iib}.

[0098] Preferred enzymes E_{iib} in connection with the third genetic modification correspond to the enzymes E_{iib} which have been emphasized above as being preferred in connection with the first genetic modification.

### Specific Enzymes Eᵥ

[0099] In cells which are preferred according to the invention, the enzyme Eᵥ is one which comprises sequences selected from among:

NP_{—}808414.2, NP_{—}001178653.1, XP_{—}003272721.1, XP_{—}002720111.1, NP_{—}001002254.1, XP_{—}529027.1, XP_{—}002831804.1, BAC28882.1, XP_{—}549056.2, XP_{—}002918053.1, XP_{—}001085075.1, XP_{—}002763005.1, XP_{—}002700092.1, XP_{—}599558.4, EDL95940.1, XP_{—}001496780.1, CAD89267.1, EFB28125.1,
YP_{—}004747160.1, YP_{—}004746900.1, YP_{—}004746665.1, YP_{—}004746558.1, YP_{—}004746531.1, YP_{—}004746530.1, YP_{—}004745948.1, YP_{—}004745222.1, YP_{—}004744358.1, YP_{—}004743710.1, YP_{—}002492297.1, AEK40846.1, YP_{—}001847685.1, YP_{—}001712672.1, YP_{—}001706290.1, YP_{—}004724737.1, YP_{—}004723134.1, AEJ51098.1, AEJ48174.1, AEJ47480.1, YP_{—}004392630.1, YP_{—}004099725.1, YP_{—}003912033.1, YP_{—}003652731.1, YP_{—}003301387.1, YP_{—}003298139.1, YP_{—}001509672.1, YP_{—}001505948.1, YP_{—}001432486.1, YP_{—}001432432.1, YP_{—}924893.1, YP_{—}923981.1, YP_{—}922869.1, YP_{—}922597.1, YP_{—}922419.1, ZP_{—}08629145.1, ZP_{—}08628906.1, YP_{—}001380027.1, YP_{—}001280731.1, YP_{—}001280730.1, YP_{—}888966.1, YP_{—}890540.1, YP_{—}888236.1, YP_{—}888223.1, YP_{—}888574.1, YP_{—}884705.1, YP_{—}889488.1, YP_{—}886248.1, YP_{—}882534.1, YP_{—}881069.1, YP_{—}881444.1, YP_{—}883472.1, YP_{—}879642.1, YP_{—}884073.1, YP_{—}880917.1, YP_{—}882201.1, YP_{—}879422.1, YP_{—}707862.1, YP_{—}707847.1, YP_{—}707633.1, YP_{—}707572.1, YP_{—}707571.1, YP_{—}706785.1, YP_{—}706267.1, YP_{—}705586.1, YP_{—}705294.1, YP_{—}702929.1, YP_{—}701572.1, YP_{—}700576.1, YP_{—}700081.1, YP_{—}700033.1, YP_{—}700018.1, YP_{—}700017.1, YP_{—}699999.1, CCB78299.1, CCB78283.1, CCB72233.1, YP_{—}004663601.1, YP_{—}004525283.1, YP_{—}004524901.1, YP_{—}004524237.1, YP_{—}004524223.1, YP_{—}004523752.1, YP_{—}004522677.1, YP_{—}004521797.1, YP_{—}004521441.1, YP_{—}004020500.1, YP_{—}004014348.1, EGO40684.1, EGO38684.1, EGO38655.1, EGO37244.1, EGO36970.1, EGO36701.1, YP_{—}003951335.1, YP_{—}003812176.1, YP_{—}003811992.1, YP_{—}003810691.1, YP_{—}003810418.1, YP_{—}003809501.1, ZP_{—}08574204.1, CCA19760.1, XP_{—}002900672.1, ZP_{—}06414567.1, ZP_{—}06413635.1, ZP_{—}06411773.1, ZP_{—}06411772.1, ZP_{—}06271823.1, ZP_{—}05620754.1, ZP_{—}05360001.1, ZP_{—}04752019.1, ZP_{—}04751943.1, ZP_{—}04750965.1, ZP_{—}04750465.1, ZP_{—}04750453.1, ZP_{—}04750228.1, ZP_{—}04750091.1, ZP_{—}04749363.1, ZP_{—}04749348.1, ZP_{—}04749293.1, ZP_{—}04749287.1, ZP_{—}04749022.1, ZP_{—}04748677.1, ZP_{—}04747379.1, ZP_{—}04747377.1, ZP_{—}04747348.1, ZP_{—}04747282.1, ZP_{—}04747159.1, ZP_{—}04747093.1, ZP_{—}04746958.1, ZP_{—}04717323.1, ZP_{—}04684258.1, ZP_{—}04386203.1, ZP_{—}04385082.1, ZP_{—}04384030.1, ZP_{—}04384029.1, ZP_{—}03534755.1, ZP_{—}01115502.1, ZP_{—}01102322.1, YP_{—}004583872.1, YP_{—}004583323.1, YP_{—}004573656.1, YP_{—}004571392.1, YP_{—}003513699.1, ZP_{—}08553011.1, ZP_{—}08552672.1, YP_{—}003467054.1, YP_{—}003572597.1, YP_{—}579515.1, YP_{—}001136465.1, YP_{—}001136231.1, YP_{—}001135959.1, YP_{—}001135349.1, YP_{—}001133828.1, YP_{—}001133806.1, YP_{—}001133693.1, YP_{—}001133270.1, YP_{—}001132329.1, YP_{—}001131721.1, YP_{—}001131631.1, YP_{—}001073715.1, YP_{—}001073143.1, YP_{—}001072388.1, YP_{—}001072036.1, YP_{—}001071893.1, YP_{—}001071814.1, YP_{—}001071689.1, YP_{—}001070856.1, YP_{—}001069682.1, YP_{—}001069164.1, YP_{—}001068496.1, YP_{—}939377.1, YP_{—}642242.1, YP_{—}641664.1, YP_{—}641419.1, YP_{—}640919.1, YP_{—}640783.1, YP_{—}640704.1, YP_{—}640572.1, YP_{—}640571.1, YP_{—}640494.1, YP_{—}639709.1, YP_{—}639198.1, YP_{—}638523.1, YP_{—}638030.1, YP_{—}637968.1, YP_{—}637380.1, YP_{—}446603.1, NP_{—}001185377.1, NP_{—}200151.2, NP_{—}568547.1, NP_{—}197641.1, NP_{—}200150.1, NP_{—}197139.1, NP_{—}190490.1, NP_{—}190488.1, NP_{—}177356.1, YP_{—}004495408.1, YP_{—}004495023.1, YP_{—}004494197.1, YP_{—}004494168.1, YP_{—}004493973.1, YP_{—}004493936.1, YP_{—}004493628.1, YP_{—}004493589.1, YP_{—}004493509.1, YP_{—}004493477.1, YP_{—}004493462.1, YP_{—}004492352.1, YP_{—}004492155.1, YP_{—}004492039.1, YP_{—}004491716.1, YP_{—}004491715.1, YP_{—}004491501.1, YP_{—}003375642.1, YP_{—}003411203.1, YP_{—}003410436.1, YP_{—}003395271.1, YP_{—}003395089.1, YP_{—}003393635.1, YP_{—}003384208.1, YP_{—}003379551.1, ZP_{—}04388235.1, YP_{—}002134168.1, ZP_{—}01900421.1, ZP_{—}01900085.1, ZP_{—}01899829.1, ZP_{—}01898741.1, BAK05274.1, BAJ93623.1, BAJ97841.1, BAK08349.1, BAJ93204.1, BAJ92722.1, BAK06983.1, BAJ86545.1, BAK02325.1, BAJ85619.1, BAJ84892.1, ZP_{—}05218281.1, ZP_{—}05218149.1, ZP_{—}05217310.1, ZP_{—}05216978.1, ZP_{—}05216447.1, ZP_{—}05216446.1, ZP_{—}05216025.1, ZP_{—}05214687.1, ZP_{—}08476543.1, ZP_{—}04749239.1, YP_{—}823060.1, ADP99639.1, ADP98951.1, ADP98855.1, ADP98710.1, ADP96265.1, ZP_{—}08461736.1, ZP_{—}08461735.1, ZP_{—}07608690.1, YP_{—}045555.1 (encoded by SEQ ID No.: 19), YP_{—}872243.1, YP_{—}004009106.1, YP_{—}004008736.1, YP_{—}004008003.1, YP_{—}004007600.1, YP_{—}004006799.1, YP_{—}004006436.1, YP_{—}004006072.1, YP_{—}004005008.1, YP_{—}003486913.1, NP_{—}301898.1, ZP_{—}08434757.1, YP_{—}004079491.1, YP_{—}004078785.1, YP_{—}004077880.1, YP_{—}004076486.1, YP_{—}004076464.1, YP_{—}004076350.1, YP_{—}004075391.1, YP_{—}004074864.1, ZP_{—}01103855.1, YP_{—}465274.1, ZP_{—}08403393.1, ZP_{—}08402717.1, ZP_{—}08402716.1, YP_{—}004427559.1, YP_{—}001277083.1, YP_{—}001276783.1, YP_{—}524767.1, YP_{—}522739.1, YP_{—}521788.1, YP_{—}004335162.1, YP_{—}004333708.1, YP_{—}004332973.1, YP_{—}004332349.1, YP_{—}004157731.1, YP_{—}004224204.1, YP_{—}003275673.1, YP_{—}003275371.1, YP_{—}003274979.1, YP_{—}003274924.1, YP_{—}003274705.1, YP_{—}956544.1, YP_{—}955502.1, YP_{—}955007.1, YP_{—}954887.1, YP_{—}954886.1, YP_{—}954859.1, YP_{—}954399.1, YP_{—}953715.1, YP_{—}953073.1, YP_{—}952592.1, YP_{—}951909.1, YP_{—}951298.1, YP_{—}951083.1, ZP_{—}08287899.1, ZP_{—}08272356.1, ZP_{—}08270967.1, CCA60099.1, CCA56737.1, YP_{—}983728.1, YP_{—}550833.1, YP_{—}549124.1, YP_{—}121795.1, YP_{—}120815.1, YP_{—}118589.1, YP_{—}117783.1, YP_{—}117375.1, YP_{—}003646883.1, YP_{—}003646055.1, YP_{—}003645661.1, EGE49469.1, ZP_{—}08234310.1, CBZ53121.1, YP_{—}004010866.1, EGE24961.1, EGE18726.1, EGE15701.1, EGE12950.1, EGE10026.1, EGB03968.1, ZP_{—}08206563.1, ZP_{—}08205089.1, ZP_{—}08204958.1, ZP_{—}08204416.1, ZP_{—}08203326.1, YP_{—}714381.1, YP_{—}713817.1, YP_{—}694462.1 (encoded by SEQ ID No.: 67), YP_{—}693524.1, YP_{—}003341775.1, YP_{—}003339587.1, ZP_{—}08197177.1, ADW01905.1, YP_{—}004242683.1, ZP_{—}07484742.2, ZP_{—}07441979.2, ZP_{—}07441978.2, ZP_{—}07437333.2, ZP_{—}06960424.1, ZP_{—}06801236.1, ZP_{—}06799517.1, ZP_{—}05769718.1, ZP_{—}05768326.1, ZP_{—}05767970.1, ZP_{—}05766272.1, ZP_{—}05763839.1, YP_{—}003204265.1, YP_{—}003203570.1, YP_{—}003200768.1, YP_{—}003134884.1, YP_{—}003134608.1, ZP_{—}05140320.1, NP_{—}001140997.1, EEE64643.1, EEE55448.1, EEE32548.1, ZP_{—}03534756.1, ZP_{—}03533653.1, ZP_{—}03531929.1, EEC71274.1, EAY98969.1, EAY75974.1, EAY75973.1, ADZ24988.1, ZP_{—}08157247.1, ZP_{—}08156660.1, ZP_{—}08156249.1, ZP_{—}08153292.1, ZP_{—}08152876.1, ZP_{—}08152662.1, YP_{—}002946672.1, YP_{—}960669.1, YP_{—}960629.1, YP_{—}960328.1, YP_{—}958134.1, YP_{—}957462.1, YP_{—}001022272.1, ZP_{—}08123690.1, ZP_{—}08120547.1, ZP_{—}08119498.1, EGB29195.1, EGB27143.1, YP_{—}003770089.1, YP_{—}003769971.1, YP_{—}003764703.1, YP_{—}003764513.1, YP_{—}003103950.1, YP_{—}003168536.1, YP_{—}003168331.1, YP_{—}003166844.1, CAJ88696.1, NP_{—}769520.1, YP_{—}001141853.1, YP_{—}001108534.1, YP_{—}001106516.1, YP_{—}907824.1, YP_{—}907344.1, YP_{—}906945.1, YP_{—}906856.1, YP_{—}906855.1, YP_{—}906831.1, YP_{—}906494.1, YP_{—}906243.1, YP_{—}905962.1, YP_{—}905765.1, YP_{—}905343.1, YP_{—}905239.1, YP_{—}325796.1, YP_{—}130413.1, NP_{—}625255.1, NP_{—}624462.1, NP_{—}338129.1, NP_{—}338004.1, NP_{—}337859.1, NP_{—}337740.1, NP_{—}337694.1, NP_{—}336266.1, NP_{—}335919.1, NP_{—}335351.1, NP_{—}334638.1, NP_{—}218257.1, NP_{—}218251.1, NP_{—}217997.1, NP_{—}217888.1, NP_{—}217751.1, NP_{—}217750.1, NP_{—}217646.1, NP_{—}217604.1, NP_{—}217603.1, NP_{—}217000.1, NP_{—}216801.1, NP_{—}216276.1, NP_{—}215941.1, NP_{—}215410.1, NP_{—}214735.1, ZP_{—}04661667.1, EFW44815.1, EFW44455.1, ZP_{—}08024634.1, ZP_{—}08024620.1, ZP_{—}08023777.1, ZP_{—}08023597.1, YP_{—}002784032.1, YP_{—}002783585.1, YP_{—}002782904.1, YP_{—}002782647.1, YP_{—}002780099.1, YP_{—}002779887.1, YP_{—}002778497.1, YP_{—}002777657.1, YP_{—}002777402.1, ZP_{—}07966321.1, ZP_{—}07944768.1, CBI21867.3, CBI40547.3, CBI40544.3, CBI40540.3, CBI40536.3, CBI40534.3, CBI40533.3, CBI32385.3, ZP_{—}05765756.1, ZP_{—}05765643.1, ZP_{—}05765597.1, ZP_{—}05765596.1, YP_{—}001705267.1, YP_{—}001704692.1, YP_{—}001704281.1, YP_{—}001702654.1, YP_{—}001701260.1, ZP_{—}05770434.1, ZP_{—}05766274.1, ZP_{—}05762133.1, ZP_{—}05762130.1, ZP_{—}01101223.1, YP_{—}481580.1, YP_{—}979623.1, YP_{—}979196.1, ZP_{—}07414300.2, ZP_{—}03537340.1, ZP_{—}03537339.1, ZP_{—}03536772.1, ZP_{—}03536404.1, ZP_{—}03433478.1, ZP_{—}03430367.1, ZP_{—}03430260.1, ZP_{—}03429345.1, ZP_{—}03428583.1, ZP_{—}03426905.1, ZP_{—}03426458.1, ZP_{—}03426456.1, ZP_{—}03426455.1, ZP_{—}03425014.1, ZP_{—}03424082.1, ZP_{—}03421649.1, ZP_{—}03419291.1, ZP_{—}03418394.1, ZP_{—}03417976.1, ZP_{—}03414875.1, ZP_{—}06952098.1, ZP_{—}05528769.1, ZP_{—}05527907.1, ZP_{—}05227984.1, ZP_{—}05227897.1, ZP_{—}05227653.1, ZP_{—}05227585.1, ZP_{—}05227420.1, ZP_{—}05227202.1, ZP_{—}05226387.1, ZP_{—}05226386.1, ZP_{—}05225355.1, ZP_{—}05225200.1, ZP_{—}05223431.1, ZP_{—}05223402.1, ZP_{—}04697793.1, ZP_{—}02550609.1, ZP_{—}02548969.1, EEE25493.1, ABO13188.2, ZP_{—}07205208.1, YP_{—}589436.1, BAJ33896.1, ZP_{—}07718107.1, ZP_{—}07717513.1, ZP_{—}07717390.1, ZP_{—}07716424.1, ZP_{—}04384387.1, ZP_{—}07376578.1, ZP_{—}06871097.1, ZP_{—}06852444.1, ZP_{—}06852442.1, ZP_{—}06852283.1, ZP_{—}06852150.1, ZP_{—}06852032.1, ZP_{—}06850980.1, ZP_{—}06850766.1, ZP_{—}06850644.1, ZP_{—}06849846.1, ZP_{—}06849446.1, ZP_{—}06849265.1, ZP_{—}06848894.1, ZP_{—}06848550.1, ZP_{—}06847321.1, ZP_{—}06847245.1, ZP_{—}06728640.1, ZP_{—}06155537.1, ZP_{—}03822106.1, ZP_{—}03822105.1, ZP_{—}03264909.1, ZP_{—}01915979.1, ZP_{—}01914209.1, ZP_{—}01909198.1, ZP_{—}01895985.1, ZP_{—}01893763.1, ZP_{—}01893601.1, ZP_{—}01893547.1, ZP_{—}01864269.1, ZP_{—}01736818.1, ZP_{—}01693481.1, ZP_{—}01626518.1, ZP_{—}01616172.1, ZP_{—}01461648.1, ZP_{—}01439861.1, ZP_{—}01311414.1, ZP_{—}01222733.1, ZP_{—}01038993.1, ZP_{—}00997001.1, ZP_{—}06533596.1, ZP_{—}07308012.1, ZP_{—}07282351.1, ZP_{—}07282257.1, ZP_{—}07278697.1, ZP_{—}07277986.1, ZP_{—}07277799.1, ZP_{—}07011797.1, ZP_{—}06913634.1, ZP_{—}06711075.1, ZP_{—}06575037.1, ZP_{—}06523715.1, ZP_{—}06522644.1, ZP_{—}06520408.1, ZP_{—}06518751.1, ZP_{—}06514733.1, ZP_{—}06511304.1, ZP_{—}06510466.1, ZP_{—}06509700.1, ZP_{—}06504004.1, ZP_{—}06452618.1, ZP_{—}06451687.1, ZP_{—}06450049.1, ZP_{—}06444722.1, ZP_{—}06443996.1, ZP_{—}06443677.1, ZP_{—}06438510.1, ZP_{—}06435077.1, ZP_{—}06434554.1, ZP_{—}06432969.1, ZP_{—}06431341.1, ZP_{—}06430915.1, ZP_{—}05129423.1, ZP_{—}05127637.1, ZP_{—}05126217.1, ZP_{—}05096686.1, ZP_{—}05095013.1, ZP_{—}05094400.1, ZP_{—}05093434.1, ZP_{—}05043539.1, ZP_{—}05041631.1, ZP_{—}04959394.1, ZP_{—}04956551.1, ZP_{—}01052702.1, YP_{—}437020.1, YP_{—}436128.1, YP_{—}432512.1, YP_{—}432391.1, ZP_{—}06072118.1, ZP_{—}06069021.1, ZP_{—}06065092.1, ZP_{—}06062254.1, YP_{—}003032200.1, YP_{—}003030813.1, YP_{—}002766854.1, YP_{—}002766842.1, YP_{—}002766292.1, YP_{—}002765623.1, YP_{—}002765076.1, YP_{—}002764977.1, YP_{—}002764976.1, YP_{—}002764693.1, YP_{—}002764633.1, YP_{—}002646305.1, YP_{—}002646304.1, YP_{—}001853537.1, YP_{—}001853530.1, YP_{—}001853214.1, YP_{—}001852100.1, YP_{—}001851711.1, YP_{—}001851686.1, YP_{—}001851684.1, YP_{—}001851611.1, YP_{—}001851610.1, YP_{—}001851579.1, YP_{—}001850950.1, YP_{—}001850935.1, YP_{—}001850900.1, YP_{—}001850899.1, YP_{—}001850378.1, YP_{—}001849911.1, YP_{—}001849825.1, YP_{—}001849624.1, YP_{—}001849470.1, YP_{—}001848848.1, YP_{—}001848784.1, YP_{—}001822237.1, YP_{—}001289190.1, YP_{—}001289078.1, YP_{—}001288434.1, YP_{—}001287727.1, YP_{—}001286168.1, YP_{—}001085790.1, YP_{—}856793.1, YP_{—}629387.1, YP_{—}615587.1, YP_{—}615252.1, YP_{—}457389.1, YP_{—}263530.1, NP_{—}962591.1, NP_{—}962411.1, NP_{—}962281.1, NP_{—}961234.1, NP_{—}960903.1, NP_{—}960387.1, NP_{—}960090.1, NP_{—}959281.1, NP_{—}959065.1, NP_{—}857403.1, NP_{—}857149.1, NP_{—}857148.1, NP_{—}857047.1, NP_{—}856907.1, NP_{—}856759.1, NP_{—}856156.1, NP_{—}855443.1, NP_{—}855112.1, NP_{—}853892.1, NP_{—}828432.1, NP_{—}603766.1, XP_{—}003081224.1, YP_{—}003778608.1, YP_{—}003730939.1, XP_{—}003059244.1, ADI13131.1, XP_{—}002992800.1, XP_{—}002963877.1, XP_{—}001419779.1, XP_{—}002988280.1, XP_{—}002987493.1, CBH32551.1, CBH32550.1, CBH19575.1, CBH19574.1, YP_{—}003627553.1, XP_{—}002879777.1, XP_{—}002877657.1, XP_{—}002877655.1, XP_{—}002873570.1, XP_{—}002871716.1, XP_{—}002870738.1, XP_{—}002868506.1, XP_{—}002865972.1, XP_{—}002864239.1, XP_{—}002862308.1, ZP_{—}05823139.1, NP_{—}001043877.1, ZP_{—}06693274.1, ZP_{—}06058985.1, NP_{—}001044374.1, XP_{—}002835451.1, XP_{—}002787542.1, XP_{—}002785958.1, XP_{—}002785645.1, XP_{—}002783220.1, XP_{—}002774061.1, XP_{—}002767852.1, XP_{—}002766051.1, XP_{—}002765456.1, XP_{—}002765455.1, XP_{—}002677788.1, XP_{—}002671612.1, XP_{—}002736281.1, CBA31373.1, XP_{—}002184474.1, XP_{—}002325936.1, XP_{—}002323705.1, XP_{—}002325937.1, XP_{—}002323911.1, XP_{—}002323706.1, XP_{—}002328965.1, XP_{—}002318416.1, XP_{—}002310400.1, ACY38597.1, ACY38596.1, ACY38595.1, ACY38594.1, ACY38593.1, ACY38592.1, ACY38591.1, ACY38590.1, ACX81315.1, ACX81314.1, XP_{—}001868729.1, XP_{—}001847517.1, XP_{—}001847515.1, XP_{—}002502575.1, ACU20370.1, ACU18073.1, XP_{—}002523348.1, XP_{—}002516707.1, XP_{—}002429016.1, BAH89673.1, XP_{—}002440221.1, XP_{—}002459294.1, XP_{—}002458560.1, XP_{—}320167.4, XP_{—}001780431.1, XP_{—}002364905.1, XP_{—}002263196.1, XP_{—}002263137.1, XP_{—}002263409.1, XP_{—}002263252.1, XP_{—}002268615.1, XP_{—}002278404.1, XP_{—}002274522.1, XP_{—}002282418.1, XP_{—}001633379.1, XP_{—}001632267.1, XP_{—}001632004.1, XP_{—}001622638.1, XP_{—}002155609.1, XP_{—}759225.1, XP_{—}002152406.1, XP_{—}001914129.1, XP_{—}001738032.1, XP_{—}001731626.1, XP_{—}001209859.1, CAN79451.1, CAN78449.1, CAN72806.1, CAN71951.1, CAN71950.1, CAN76656.1, CAN62907.1, AAZ08051.1, ABO21022.1, ABO21021.1, ABO21020.1, ABJ96321.1, BAF01088.1, XP_{—}758106.1, BAC42871.1, BAB09801.1, BAB09102.1, in particular YP_{—}045555.1 (encoded by SEQ ID No.: 19), YP_{—}694462.1 (encoded by SEQ ID No.: 67) and NP_{—}808414.2.
and
proteins with a polypeptide sequence in which up to 60%, preferably up to 25%, especially preferably up to 15%, in particular up to 10, 9, 8, 7, 6, 5, 4, 3, 2, 1% of the amino acid residues are modified in comparison with the abovementioned reference sequences by deletion, insertion, substitution, or a combination thereof and which still have at least 50%, preferably 65%, especially preferably 80%, in particular more than 90%, of the activity of the protein with the corresponding abovementioned reference sequence, where 100% activity of the reference protein is understood as meaning the increase of the activity of the cells used as biocatalyst, that is to say the amount of substance reacted per unit time, based on the cell weight used (units per gram of cell dry weight [U/g CDW]), compared with the activity of the biocatalyst without the presence of the reference protein, where activity in this context and in the context of the determination of the activity of the enzyme Eᵥ is generally understood in particular as meaning the conversion of dodecanoyl-CoA thioester and/or dodecanoyl-ACP thioester with methanol into dodecanoyl methyl ester.

[0100] If the enzyme Eᵥ is an alcohol O-acyltransferase of EC 2.3.1.84, it is preferred that they are selected from among:

EGA72844.1, NP_{—}015022.1, S69991, AAP72991.1, EDN63695.1, BAA05552.1, AAP72992.1, S69992, AAP72995.1, XP_{—}002552712.1, XP_{—}001646876.1, XP_{—}002551954.1, EGA82692.1, EDN61766.1, EGA86689.1, EGA74966.1, AAU09735.1, NP_{—}011693.1, XP_{—}445666.1, BAA13067.1, AAP72993.1, EGA62172.1, XP_{—}455762.1, EGA58658.1,
and
proteins with a polypeptide sequence in which up to 60%, preferably up to 25%, especially preferably up to 15%, in particular up to 10, 9, 8, 7, 6, 5, 4, 3, 2, 1% of the amino acid residues are modified in comparison with the abovementioned reference sequences by deletion, insertion, substitution, or a combination thereof and which still have at least 50%, preferably 65%, especially preferably 80%, in particular more than 90%, of the activity of the protein with the corresponding abovementioned reference sequence, where 100% activity of the reference protein is understood as meaning the increase of the activity of the cells used as biocatalyst, that is to say the amount of substance reacted per unit time, based on the cell weight used (units per gram of cell dry weight [U/g CDW]), compared with the activity of the biocatalyst without the presence of the reference protein, where activity in this context and in the context of the determination of the activity of the enzyme Eᵥ is generally understood in particular as meaning the conversion of dodecanoyl-CoA thioester with methanol into dodecanoyl methyl ester.

[0101] Microorganisms which are preferred according to the invention are those which are obtained when the microorganisms listed hereinbelow featuring a third genetic modification within the meaning of the invention are employed as starting point by being equipped with a first and second genetic modification and, if appropriate, at least one further genetic modification within the meaning of the invention.

[0102] WO2007136762 A2 describes microorganisms which include a third genetic modification so that they are capable of forming more fatty acids and fatty acid derivatives, in particular fatty acid esters, wax esters, hydrocarbons and alkan-1-ols, from at least one simple carbon source in comparison with their wild type and which are preferably employed according to the invention, in particular on pages 2 to 4 and 21 to 24, FIGS. 2 to 4, exemplary embodiments 1, 2 and 5 to 7 and Claims 1, 2, 5, 6, 9 to 27 and 33. The document also describes enzymes Eᵥ which are preferred according to the invention and their sequences, in particular on pages 21 to 24, in Table 10 and FIG. 10.

### Specific Enzymes Eᵥₐ

[0103] In cells which are preferred according to the invention, the enzyme Eᵥₐ is one which comprises sequences selected from among YP_{—}001851637.1 (encoded by SEQ ID No.: 114) and proteins having a polypeptide sequence in which up to 60%, preferably up to 25%, particularly preferably up to 15%, in particular up to 10, 9, 8, 7, 6, 5, 4, 3, 2, 1% of the amino acid residues are modified in comparison with the abovementioned reference sequence by deletion, insertion, substitution or a combination thereof and which still have at least 50%, preferably 65%, particularly preferably 80%, in particular more than 90%, of the activity of the protein with the corresponding abovementioned reference sequence, where 100% activity of the reference protein is understood as meaning the increase of the activity of the cells used as biocatalyst, that is to say the amount of substance reacted per unit time, based on the cell weight used (units per gram of cell dry weight [U/g CDW]), compared with the activity of the biocatalyst without the presence of the reference protein, where activity in this context and in the context of the determination of the activity of the enzyme Eᵥₐ is generally understood in particular as meaning the conversion of lauric acid and S-adenosylmethionine to lauric acid methyl ester and S-adenosylhomocysteine.

### Specific Enzymes Eᵥᵢ

[0104] In cells which are preferred according to the invention, the enzyme Eᵥᵢ is one which comprises sequences selected from among YP_{—}001724804.1 (encoded by SEQ ID No.: 18)

and
proteins with a polypeptide sequence in which up to 60%, preferably up to 25%, especially preferably up to 15%, in particular up to 10, 9, 8, 7, 6, 5, 4, 3, 2, 1% of the amino acid residues are modified in comparison with the abovementioned reference sequence by deletion, insertion, substitution, or a combination thereof and which still have at least 50%, preferably 65%, especially preferably 80%, in particular more than 90%, of the activity of the protein with the corresponding abovementioned reference sequence, where 100% activity of the reference protein is understood as meaning the increase of the activity of the cells used as biocatalyst, that is to say the amount of substance reacted per unit time, based on the cell weight used (units per gram of cell dry weight [U/g CDW]), compared with the activity of the biocatalyst without the presence of the reference protein, where activity in this context and in the context of the determination of the activity of the enzyme Eᵥᵢ is generally understood in particular as meaning the synthesis of dodecanoyl-CoA thioester.

### Specific Enzymes Eᵥᵢᵢ

[0105] Microorganisms which are preferred according to the invention are those which are obtained when the microorganisms listed hereinbelow featuring a third genetic modification within the meaning of the invention are employed as starting point by being equipped with a first and second genetic modification and, if appropriate, at least one further genetic modification within the meaning of the invention.

[0106] WO2010075483 A2 describes microorganisms which include a third genetic modification so that they are capable of forming more fatty acids and fatty acid derivatives, in particular fatty acids, fatty acid methyl esters, fatty acid ethyl esters, fatty alcohols, fatty alkyl acetates, fatty aldehydes, fatty amines, fatty amides, fatty sulphates, fatty ethers, ketones, alkanes, internal and terminal olefins, dicarboxylic acids, α,ω-dicarboxylic acids and α,ω-diols, from at least one simple carbon source in comparison with their wild type and which are preferably employed according to the invention, in particular in sections [0061] to [0090] and [0287] to [0367], FIGS. 1, 4 and 5, exemplary embodiments 1 to 38 and Claims 18 to 26. The document also describes enzymes Eᵥᵢᵢ which are preferred according to the invention and their sequences, in particular in sections [0012] to [0060], Tables 7, 17, 26 and 27, FIGS. 1, 44 to 47 and 55 to 59, exemplary embodiments 1 to 38 and Claims 1 to 17.

Fourth Genetic Modification for the Production of Alkan-1-ols, Alkan-1-als, Alkan-1-Amines, Alkanes, Olefins, Alken-1-als, Alken-1-ols and Alken-1-Amines from a Simple Carbon Source

[0107] In the event that the production of alkan-1-ols, alkan-1-als, alkan-1-amines and olefins is desired, it may be advantageous to suitably enzymatically reduce, aminate, decarboxylate or decarbonylate the corresponding carboxylic acids or carboxylic acid esters.

[0108] To this end, microorganisms which are preferred according to the invention include a fourth genetic modification which comprises an activity of at least one of the following, selected from the group

E_{iib} acyl-CoA (Coenzyme A):ACP (Acyl Carrier Protein) transacylase, which converts an ACP thioester into a CoA thioester or a CoA thioester into an ACP thioester,
Eᵥᵢ acyl-CoA (Coenzyme A) synthetase, preferably of EC 6.2.1.3, which catalyses the synthesis of an acyl-coenzyme A thioester,
Eᵥᵢᵢᵢ acyl-CoA (Coenzyme A) reductase, preferably of EC 1.2.1.42 or EC 1.2.1.50, which preferably catalyses the reduction of an acyl-coenzyme A thioester to give the corresponding alkan-1-al or alkan-1-ol,
Eᵢₓ fatty acid reductase (also fatty aldehyde dehydrogenase or arylaldehyde oxidoreductase), preferably of EC 1.2.1.3, EC 1.2.1.20 or EC 1.2.1.48, which preferably catalyses the reduction of an alkanoic acid to give the corresponding alkan-1-al,
Eₓ acyl-ACP (Acyl Carrier Protein) reductase, preferably of EC 1.2.1.80, which catalyses the reduction of an acyl-ACP thioester to give the corresponding alkan-1-al or alkan-1-ol,
Eₓᵢ cytochrome P450 fatty acid decarboxylase, which catalyses the conversion of an alkanoic acid with n carbon atoms into a corresponding terminal olefin with n−1 carbon atoms, in particular of dodecanoic acid to undec-10-enoic acid,
Eₓᵢᵢ alkan-1-al decarbonylase, which catalyses the conversion of an alkan-1-al (n carbon atoms) into a corresponding alkane (n−1 carbon atoms), and
Eₓᵢᵢᵢ alkan-1-al transaminase, which catalyses the conversion of an alkan-1-al into a corresponding alkan-1-amine,
which is increased in comparison with the enzymatic activity of the wild type of the microorganism.

[0109] In this context, it is especially preferred that the fourth genetic modification comprises combinations of increased activities of the enzymes selected from among

Eᵢₓ, Eₓ, Eₓᵢ, EᵥᵢEᵥᵢᵢᵢ, EᵥᵢEₓE_{iib}, EᵥᵢᵢᵢEₓᵢᵢ, EᵥᵢᵢᵢEₓᵢᵢᵢ, EᵢₓEₓᵢᵢ, EᵢₓEₓᵢᵢᵢ, EₓEₓᵢᵢ, EₓEₓᵢᵢᵢ, EᵥᵢEᵥᵢᵢᵢEₓᵢᵢ, EᵥᵢEᵥᵢᵢᵢEₓᵢᵢᵢ, EₓEₓᵢᵢEᵥᵢE_{iib} and EₓEₓᵢᵢᵢEᵥᵢE_{iib}.

[0110] Preferred enzymes E_{iib} in connection with the fourth genetic modification correspond to the enzymes E_{iib} emphasized above as being preferred in the context of the first and third genetic modification.

[0111] Preferred enzymes Eᵥᵢ in connection with the fourth genetic modification correspond to the enzymes Eᵥᵢ emphasized above as being preferred in the context of the third genetic modification.

### Specific Enzymes Eᵥᵢᵢᵢ

[0112] Microorganisms which are preferred according to the invention are those which are obtained when the microorganisms including a fourth genetic modification within the meaning of the invention listed hereinbelow are employed as starting point by being equipped with a first and second genetic modification and, if appropriate, at least one further genetic modification within the meaning of the invention.

[0113] WO2011008565 A1 describes microorganisms which include a fourth genetic modification so that they are capable of forming more fatty acids and fatty acid derivatives, in particular fatty acids, fatty aldehydes, fatty alcohols, alkanes and fatty acid esters, from at least one simple carbon source in comparison with their wild type and which are preferably employed according to the invention, in particular in sections [0021], [0103] to [0106], [0108] and [0129]. The document also describes enzymes Eᵥᵢᵢᵢ which are preferred according to the invention and their sequences, in particular in sections [0104] to [0106] and [0108] and [0129] and exemplary embodiment 11.

[0114] WO2008151149 A2 describes microorganisms which include a fourth genetic modification so that they are capable of forming more microbial oil in comparison with their wild type from at least one simple carbon source and which are preferably employed according to the invention, in particular in sections [0009], [0015] to [0037], [0053], [0071], [0171], [0174] to [0191], [0274] and [0396], Claims 53 to 114, 188 to 206 and 344 to 355 and Tables 1 to 3. The document also describes enzymes Eᵥᵢᵢᵢ which are preferred according to the invention and their sequences, in particular in sections [0255] to [0261] and [0269] and Tables 6 and 7.

[0115] WO2007136762 A2 describes microorganisms which include a fourth genetic modification so that they are capable of forming more fatty acids and fatty acid derivatives, in particular fatty acid esters, wax esters, hydrocarbons and fatty alcohols, from at least one simple carbon source in comparison with their wild type and which are preferably employed according to the invention, in particular on pages 2 to 4 and 19 to 20, FIGS. 2 to 4, exemplary embodiments 2 to 7 and Claims 4, 8 to 27 and 33. The document also describes enzymes Eᵥᵢᵢᵢ which are preferred according to the invention and their sequences, in particular on pages 19 to 20, in Table 10 and FIG. 10.

[0116] WO2011019858 A1 describes microorganisms which include a fourth genetic modification so that they are capable of forming more fatty acids and fatty acid derivatives, in particular fatty alcohols, from at least one simple carbon source in comparison with their wild type and which are preferably employed according to the invention, in particular in sections [0015] to [0020], [0064] to [0074], [0085] to [0086] and [0092] to [0099], exemplary embodiments 1 to 13, FIG. 1 and Claims 1 to 14. The document also describes enzymes Eᵥᵢᵢᵢ which are preferred according to the invention and their sequences, in particular in sections [0004] to [0007] and [0075] to [0080] and exemplary embodiments 1 to 13.

[0117] WO2009140695 A1 describes microorganisms which include a fourth genetic modification so that they are capable of forming more fatty acids and fatty acid derivatives, in particular hydrocarbons, from at least one simple carbon source in comparison with their wild type and which are preferably employed according to the invention in particular in sections [0031] to [0040], [0051] and [0214] to [0233], exemplary embodiments 5 to 24 and 28 to 30, Table 1, FIG. 40, and Claims 29 to 30. The document also describes enzymes Eᵥᵢᵢᵢ which are preferred according to the invention and their sequences, in particular in sections [0023] to [0030], [0056], [0066] to [0069] and [0193] to [0208], Table 1, FIG. 39, exemplary embodiments 5 to 24 and 28 to 30 and Claims 69 to 74.

[0118] WO2011008535 A1 describes microorganisms which include a fourth genetic modification so that they are capable of forming more fatty acids and fatty acid derivatives, in particular carboxylic acids, hydroxycarboxylic acids and their lactones from at least one simple carbon source in comparison with their wild type and which are preferably employed according to the invention, in particular in sections [0023] to [0024] and [0133] to [0158], FIG. 13, Claims 39 and 45 to 47 and exemplary embodiments 1 to 5. The document also describes enzymes Eᵥᵢᵢᵢ which are preferred according to the invention and their sequences, in particular in sections [0017] to [0022], [0084] to [0132], FIGS. 2 to 12, Claims 31 to 37 and 40 to 44 and exemplary embodiments 1 to 5.

[0119] WO2010063031 A2 describes microorganisms which include a fourth genetic modification so that they are capable of forming more microbial oil from at least one simple carbon source in comparison with their wild type and which are preferably employed according to the invention, in particular in sections [0007], [0092] to [0100], [0181] to [0183] and [0199] to [0213]. The document also describes enzymes Eᵥᵢᵢᵢ which are preferred according to the invention and their sequences, in particular in sections [0191] to [0194] and Tables 4 and 5.

[0120] WO2010063032 A2 describes microorganisms which include a fourth genetic modification so that they are capable of forming more microbial oil from at least one simple carbon source in comparison with their wild type and which are preferably employed according to the invention, in particular in sections [0007], [0092] to [0100], [0181] to [0183] and [0199] to [0213]. The document also describes enzymes Eᵥᵢᵢᵢ which are preferred according to the invention and their sequences, in particular in sections [0191] to [0194] and Tables 4 and 5.

### Specific Enzymes Eᵢₓ

[0121] In cells which are preferred according to the invention, the enzyme Eᵢₓ is one which comprises sequences selected from among YP_{—}887275.1 (encoded by SEQ ID No. 117), ABI83656.1 (encoded by SEQ ID No.: 122), and

proteins with a polypeptide sequence in which up to 60%, preferably up to 25%, particularly preferably up to 15%, in particular up to 10, 9, 8, 7, 6, 5, 4, 3, 2, 1% of the amino acid residues are modified in comparison with the abovementioned reference sequence by deletion, insertion, substitution or a combination thereof and which still have at least 50%, preferably 65%, particularly preferably 80%, in particular more than 90%, of the activity of the protein with the corresponding abovementioned reference sequence, where 100% activity of the reference protein is understood as meaning the increase of the activity of the cells used as biocatalyst, that is to say the amount of substance reacted per unit time, based on the cell weight used (units per gram of cell dry weight) [U/g CDW]), compared with the activity of the biocatalyst without the presence of the reference protein, where activity in this context and in the context of the determination of the activity of the enzyme Eᵢₓ is generally understood in particular as meaning the synthesis of lauryl aldehyde, NADP, AMP and 2 Pᵢ from lauric acid, ATP, NADPH and H⁺.

[0122] Microorganisms which are preferred according to the invention are those which are obtained when the microorganisms including a fourth genetic modification within the meaning of the invention listed hereinbelow are employed as starting point by being equipped with a first and second genetic modification and, if appropriate, at least one further genetic modification within the meaning of the invention.

[0123] WO2011019858 A1 describes microorganisms which include a fourth genetic modification so that they are capable of forming more fatty acids and fatty acid derivatives, in particular fatty alcohols, from at least one simple carbon source in comparison with their wild type and which are preferably employed according to the invention, in particular in sections [0004] to [0008], [0064] to [0074], [0085] to [0086], [0095] to [0099]. The document also describes enzymes Eᵢₓ which are preferred according to the invention and their sequences, in particular in sections [0008] to [0009], [0074] and [0081] to [0082] and exemplary embodiments 1 to 13.

[0124] WO2010135624 A2 describes microorganisms which include a fourth genetic modification so that they are capable of forming more fatty acids and fatty acid derivatives, in particular carboxylic acids, hydroxycarboxylic acids and their lactones, from at least one simple carbon source in comparison with their wild type and which are preferably employed according to the invention, in particular in sections [0005], [0067] to [0085] and [0092] to [0102], Claims 13 to 17 and exemplary embodiments 1 to 4. The document also describes enzymes Eᵢₓ which are preferred according to the invention and their sequences, in particular in sections [0005] to [0006] and [0086] to [0090], FIGS. 3 to 7, Claim 28 and exemplary embodiments 1 to 4.

[0125] WO2010062480 A2 describes microorganisms which include a fourth genetic modification so that they are capable of forming more fatty acids and fatty acid derivatives, in particular fatty alcohols, from at least one simple carbon source in comparison with their wild type and which are preferably employed according to the invention, in particular in sections [0022] to [0174] and [0292] to [0316], exemplary embodiments 1 and 3 to 8, FIG. 9 and Claims 17 and 24. The document also describes enzymes Eᵢₓ which are preferred according to the invention and their sequences, in particular in sections [0019] to [0032] and [0263] to [0286], Table 1, FIGS. 6 to 8 and exemplary embodiments 1 and 3 to 8.

[0126] WO201042664 A2 describes microorganisms which include a fourth genetic modification so that they are capable of forming more fatty acids and fatty acid derivatives, in particular fatty alcohols, from at least one simple carbon source in comparison with their wild type and which are preferably employed according to the invention, in particular in sections [0236] to [0261], exemplary embodiment 2, FIGS. 1 and 5 and Claim 25. The document also describes enzymes Eᵢₓ which are preferred according to the invention and their sequences, in particular in sections [0211] to [0233], FIGS. 2 to 4 and exemplary embodiments 1 to 2.

### Specific Enzymes Eₓ

[0127] In cells which are preferred according to the invention, the enzyme Eₓ is one which comprises sequences selected from among BAB85476.1 (encoded by SEQ ID No. 77), YP_{—}047869.1 (encoded by SEQ ID No. 79 or 81), YP_{—}959486.1 (encoded by SEQ ID No. 83), YP_{—}959769.1 (encoded by SEQ ID No. 139), B9TSP7.1 (encoded by SEQ ID No. 141), and proteins with a polypeptide sequence in which up to 60%, preferably up to 25%, particularly preferably up to 15%, in particular up to 10, 9, 8, 7, 6, 5, 4, 3, 2, 1% of the amino acid residues are modified in comparison with the abovementioned reference sequences by deletion, insertion, substitution or a combination thereof and which still have at least 50%, preferably 65%, particularly preferably 80%, in particular more than 90%, of the activity of the protein with the corresponding abovementioned reference sequence, where 100% activity of the reference protein is understood as meaning the increase of the activity of the cells used as biocatalyst, that is to say the amount of substance reacted per unit time, based on the cell weight used (units per gram of cell dry weight [U/g CDW]), compared with the activity of the biocatalyst without the presence of the reference protein, where activity in this context and in the context of the determination of the activity of the enzyme Eₓ is generally understood in particular as meaning the synthesis of lauryl alcohol and NAD(P)⁺ from lauryl-ACP, NAD(P)H and H⁺.

[0128] Microorganisms which are preferred according to the invention are those which are obtained when the microorganisms including a fourth genetic modification within the meaning of the invention listed hereinbelow are employed as starting point by being equipped with a first and second genetic modification and, if appropriate, at least one further genetic modification within the meaning of the invention.

[0129] WO2007136762 A2 describes microorganisms which include a fourth genetic modification so that they are capable of forming more fatty acids and fatty acid derivatives, in particular fatty acid esters, wax esters, hydrocarbons and fatty alcohols, from at least one simple carbon source in comparison with their wild type and which are preferably employed according to the invention, in particular on pages 2 to 4 and 19 to 20, FIGS. 2 to 4, exemplary embodiments 2 to 7 and Claims 4, 8 to 27 and 33. The document also describes enzymes Eₓ which are preferred according to the invention and their sequences, in particular on pages 19 to 20, in Table 10 and FIG. 10.

[0130] WO2011019858 A1 describes microorganisms which include a fourth genetic modification so that they are capable of forming more fatty acids and fatty acid derivatives, in particular fatty alcohols, from at least one simple carbon source in comparison with their wild type and which are preferably employed according to the invention, in particular in sections [0015] to [0020], [0064] to [0074], [0085] to [0086] and [0092] to [0099], exemplary embodiments 1 to 13, FIG. 1 and Claims 1 to 14. The document also describes enzymes Eₓ which are preferred according to the invention and their sequences, in particular in sections [0004] to [0007] and [0075] to [0080] and exemplary embodiments 1 to 13.

[0131] WO2009140695 A1 describes microorganisms which include a fourth genetic modification so that they are capable of forming more fatty acids and fatty acid derivatives, in particular hydrocarbons, from at least one simple carbon source in comparison with their wild type and which are preferably employed according to the invention, in particular in sections [0031] to [0040], [0051] and [0214] to [0233], exemplary embodiments 5 to 24 and 28 to 30, Table 1, FIG. 40, and Claims 29 to 30. The document also describes enzymes Eₓ which are preferred according to the invention and their sequences, in particular in sections [0023] to [0030], [0056], [0066] to [0069] and [0193] to [0208], Table 1, FIG. 39, exemplary embodiments 5 to 24 and 28 to 30 and Claims 69 to 74.

[0132] WO2011008535 A1 describes microorganisms which include a fourth genetic modification so that they are capable of forming more fatty acids and fatty acid derivatives, in particular carboxylic acids, hydroxycarboxylic acids and their lactones, from at least one simple carbon source in comparison with their wild type and which are preferably employed according to the invention, in particular in sections [0023] to [0024] and [0133] to [0158], FIG. 13, Claims 39 and 45 to 47 and exemplary embodiments 1 to 5. The document also describes enzymes Eₓ which are preferred according to the invention and their sequences, in particular in sections [0017] to [0022], [0084] to [0132], FIGS. 2 to 12, Claims 31 to 37 and 40 to 44 and exemplary embodiments 1 to 5.

### Specific Enzymes Eₓᵢ

[0133] In cells which are preferred according to the invention, the enzyme Eₓᵢ is one which comprises sequences selected from among ADW41779.1 (encoded by SEQ ID No. 168) and proteins with a polypeptide sequence in which up to 60%, preferably up to 25%, particularly preferably up to 15%, in particular up to 10, 9, 8, 7, 6, 5, 4, 3, 2, 1% of the amino acid residues are modified in comparison with the abovementioned reference sequence by deletion, insertion, substitution or a combination thereof and which still have at least 50%, preferably 65%, particularly preferably 80%, in particular more than 90%, of the activity of the protein with the corresponding abovementioned reference sequence, where 100% activity of the reference protein is understood as meaning the increase of the activity of the cells used as biocatalyst, that is to say the amount of substance reacted per unit time, based on the cell weight used (units per gram of cell dry weight [U/g CDW]), compared with the activity of the biocatalyst without the presence of the reference protein, where activity in this context and in the context the determination of the activity of the enzyme Eₓᵢᵢᵢ is generally understood in particular as meaning the reaction of sodium palmitate with hydrogen peroxide to form pentadecene, CO₂ and water.

[0134] Microorganisms which are preferred according to the invention are those which are obtained when the microorganisms including a fourth genetic modification within the meaning of the invention listed hereinbelow are employed as starting point by being equipped with a first and second genetic modification and, if appropriate, at least one further genetic modification within the meaning of the invention.

[0135] WO2009085278 A1 describes microorganisms which include a fourth genetic modification so that they are capable of forming more fatty acids and fatty acid derivatives, in particular olefins, from at least one simple carbon source in comparison with their wild type and which are preferred according to the invention, in particular in sections [0033] to [0048], [0056] to [0063] and [0188] to [0202], FIG. 10, Table 8, exemplary embodiments 5 to 18 and Claims 28 to 51 and 188 to 195. The document also describes enzymes Eₓᵢ which are preferred according to the invention and their sequences, in particular in sections [0021] to [0032], [0051] to [0055], [0081] to [0084] and [0160] to [0183], Table 8, exemplary embodiments 5 to 18, Claims 1 to 25 and FIGS. 3, 7 and 9.

### Specific Enzymes Eₓᵢᵢ

[0136] Microorganisms which are preferred according to the invention are those which are obtained when the microorganisms including a fourth genetic modification within the meaning of the invention listed hereinbelow are employed as starting point by being equipped with a first and second genetic modification and, if appropriate, at least one further genetic modification within the meaning of the invention.

[0137] WO2009140695 A1 describes microorganisms which include a fourth genetic modification so that they are capable of forming more fatty acids and fatty acid derivatives, in particular hydrocarbons, from at least one simple carbon source in comparison with their wild type and which are preferred according to the invention, in particular in sections [0031] to [0040], [0051] and [0214] to [0233], exemplary embodiments 5 to 24 and 28 to 30, Table 1, FIG. 40, and Claims 29 to 30. The document also describes enzymes Eₓᵢᵢ which are preferred according to the invention and their sequences, in particular in sections [0023] to [0030], [0056], [0066] to [0069] and [0193] to [0208], Table 1, FIG. 38, exemplary embodiments 5 to 24 and 28 to 30 and Claims 69 to 74.

[0138] WO2008151149 A2 describes microorganisms which include a fourth genetic modification so that they are capable of forming more microbial oil, from at least one simple carbon source in comparison with their wild type and which are preferred according to the invention, in particular in sections [0009], [0015] to [0037], [0053], [0071], [0171], [0174] to [0191], [0274] and [0396], Claims 53 to 114, 188 to 206 and 344 to 355 and Tables 1 to 3. The document also describes enzymes Eₓᵢᵢ which are preferred according to the invention and their sequences, in particular in Table 8.

### Specific Enzymes Eₓᵢᵢᵢ

[0139] The enzyme Eₓᵢᵢᵢ is preferably according to the invention an ω-transaminase of EC 2.6.1.-. Preferred enzymes Eₓᵢᵢᵢ are selected from the group:

3HMU_A, AAD41041.1, AAK15486.1, ABE03917.1, ADR60699.1, ADR61066.1, ADR62525.1, AEL07495.1, CAZ86955.1, EFW82310.1, EFW87681.1, EGC99983.1, EGD03176.1, EGE58369.1, EGH06681.1, EGH08331.1, EGH24301.1, EGH32343.1, EGH46412.1, EGH55033.1, EGH62152.1, EGH67339.1, EGH70821.1, EGH71404.1, EGH78772.1, EGH85312.1, EGH97105.1, EGP57596.1, NP_{—}102850.1, NP_{—}106560.1, NP_{—}248912.1, NP_{—}248990.1, NP_{—}354026.2, NP 421926.1, NP_{—}637699.1, NP_{—}642792.1, NP_{—}744329.1, NP_{—}744732.1, NP_{—}747283.1, NP_{—}795039.1, NP_{—}901695.1 (encoded by SEQ ID No. 132), XP_{—}002943905.1, YP_{—}001021095.1, YP_{—}001059677.1, YP_{—}001061726.1, YP_{—}001066961.1, YP_{—}001074671.1, YP_{—}001120907.1, YP_{—}001140117.1, YP_{—}001170616.1, YP_{—}001185848.1, YP_{—}001188121.1, YP_{—}001233688.1, YP_{—}001268866.1, YP_{—}001270391.1, YP_{—}001345703.1, YP_{—}001412573.1, YP_{—}001417624.1, YP_{—}001526058.1, YP_{—}001579295.1, YP_{—}001581170.1, YP_{—}001668026.1, YP_{—}001669478.1, YP_{—}001671460.1, YP_{—}001685569.1, YP_{—}001747156.1, YP_{—}001749732.1, YP_{—}001765463.1, YP_{—}001766294.1, YP_{—}001790770.1, YP_{—}001808775.1, YP_{—}001809596.1, YP_{—}001859758.1, YP_{—}001888405.1, YP_{—}001903233.1, YP_{—}001977571.1, YP_{—}002229759.1, YP_{—}002231363.1, YP_{—}002280472.1, YP_{—}002297678.1, YP_{—}002543874.1, YP_{—}002549011.1, YP_{—}002796201.1, YP_{—}002801960.1, YP_{—}002875335.1, YP_{—}002897523.1, YP_{—}002912290.1, YP_{—}002974935.1, YP_{—}003060891.1, YP_{—}003264235.1, YP_{—}003552364.1, YP_{—}003578319.1, YP_{—}003591946.1, YP_{—}003607814.1, YP_{—}003641922.1, YP_{—}003674025.1, YP_{—}003692877.1, YP_{—}003755112.1, YP_{—}003896973.1, YP_{—}003907026.1, YP_{—}003912421.1, YP_{—}004086766.1, YP_{—}004142571.1, YP_{—}004147141.1, YP_{—}004228105.1, YP_{—}004278247.1, YP_{—}004305252.1, YP_{—}004356916.1, YP_{—}004361407.1, YP_{—}004378186.1, YP_{—}004379856.1, YP_{—}004390782.1, YP_{—}004472442.1, YP_{—}004590892.1, YP_{—}004612414.1, YP_{—}004676537.1, YP_{—}004693233.1, YP_{—}004701580.1, YP_{—}004701637.1, YP_{—}004704442.1, YP_{—}108931.1, YP_{—}110490.1, YP_{—}168667.1, YP_{—}237931.1, YP_{—}260624.1, YP_{—}262985.1, YP_{—}271307.1, YP_{—}276987.1, YP_{—}334171.1, YP_{—}337172.1, YP_{—}350660.1, YP_{—}351134.1, YP_{—}364386.1, YP_{—}366340.1, YP_{—}369710.1, YP_{—}370582.1, YP_{—}426342.1, YP_{—}440141.1, YP_{—}442361.1, YP_{—}468848.1, YP_{—}521636.1, YP_{—}554363.1, YP_{—}608454.1, YP_{—}610700.1, YP_{—}614980.1, YP_{—}622254.1, YP_{—}625753.1, YP_{—}680590.1, YP_{—}751687.1, YP_{—}767071.1, YP_{—}774090.1, YP_{—}774932.1, YP_{—}788372.1, YP_{—}858562.1, YP_{—}928515.1, YP_{—}983084.1, YP_{—}995622.1, ZP_{—}00948889.1, ZP_{—}00954344.1, ZP_{—}00959736.1, ZP_{—}00998881.1, ZP_{—}01011725.1, ZP_{—}01037109.1, ZP_{—}01058030.1, ZP_{—}01076707.1, ZP_{—}01103959.1, ZP_{—}01167926.1, ZP_{—}01224713.1, ZP_{—}01442907.1, ZP_{—}01446892.1, ZP_{—}01550953.1, ZP_{—}01625518.1, ZP_{—}01745731.1, ZP_{—}01750280.1, ZP_{—}01754305.1, ZP_{—}01763880.1, ZP_{—}01769626.1, ZP_{—}01865961.1, ZP_{—}01881393.1, ZP_{—}01901558.1, ZP_{—}02145337.1, ZP_{—}02151268.1, ZP_{—}02152332.1, ZP_{—}02167267.1, ZP_{—}02190082.1, ZP_{—}02242934.1, ZP_{—}02360937.1, ZP_{—}02367056.1, ZP_{—}02385477.1, ZP_{—}02456487.1, ZP_{—}02883670.1, ZP_{—}03263915.1, ZP_{—}03263990.1, ZP_{—}03400081.1, ZP_{—}03452573.1, ZP_{—}03456092.1, ZP_{—}03517291.1, ZP_{—}03529055.1, ZP_{—}03571515.1, ZP_{—}03572809.1, ZP_{—}03587785.1, ZP_{—}03588560.1, ZP_{—}03697266.1, ZP_{—}03697962.1, ZP_{—}04521092.1, ZP_{—}04590693.1, ZP_{—}04890914.1, ZP_{—}04891982.1, ZP_{—}04893793.1, ZP_{—}04902131.1, ZP_{—}04905327.1, ZP_{—}04941068.1, ZP_{—}04944536.1, ZP_{—}04945255.1, ZP_{—}04959332.1, ZP_{—}04964181.1, ZP_{—}05053721.1, ZP_{—}05063588.1, ZP_{—}05073059.1, ZP_{—}05077806.1, ZP_{—}05082750.1, ZP_{—}05091128.1, ZP_{—}05095488.1, ZP_{—}05101701.1, ZP_{—}05116783.1, ZP_{—}05121836.1, ZP_{—}05127756.1, ZP_{—}05637806.1, ZP_{—}05742087.1, ZP_{—}05783548.1, ZP_{—}05786246.1, ZP_{—}05843149.1, ZP_{—}05945960.1, ZP_{—}06459045.1, ZP_{—}06487195.1, ZP_{—}06492453.1, ZP_{—}06493162.1, ZP_{—}06703644.1, ZP_{—}06731146.1, ZP_{—}06839371.1, ZP_{—}07007312.1, ZP_{—}07266194.1, ZP_{—}07374050.1, ZP_{—}07662787.1, ZP_{—}07778196.1, ZP_{—}07797983.1, ZP_{—}08099459.1, ZP_{—}08138203.1, ZP_{—}08141719.1, ZP_{—}08142973.1, ZP_{—}08177102.1, ZP_{—}08185821.1, ZP_{—}08186468.1, ZP_{—}08208888.1, ZP_{—}08266590.1, ZP_{—}08402041.1, ZP_{—}08406891.1, ZP_{—}08522175.1, ZP_{—}08527488.1, ZP_{—}08631252.1, ZP_{—}08636687.1,
in particular NP_{—}901695.1 (encoded by SEQ ID No. 132), ZP_{—}03697266.1, AAD41041.1, YP_{—}002796201.1, ZP_{—}03697962.1, YP_{—}001859758.1, YP_{—}002229759.1, YP_{—}001120907.1, YP_{—}110490.1, ZP_{—}04964181.1, YP_{—}774932.1, YP_{—}001766294.1, YP_{—}001581170.1, YP_{—}622254.1, ZP_{—}03588560.1, YP_{—}001809596.1, YP_{—}370582.1, ZP_{—}03572809.1, NP_{—}248990.1, YP_{—}001888405.1, ZP_{—}04905327.1, YP_{—}001061726.1, YP_{—}001668026.1, ZP_{—}01750280.1, ZP_{—}07778196.1, EGH71404.1, NP_{—}744329.1, YP_{—}004147141.1, ADR61066.1, ZP_{—}05783548.1, YP_{—}004701637.1, YP_{—}366340.1, YP_{—}003264235.1, EGD03176.1, YP_{—}001268866.1, ZP_{—}01901558.1, ZP_{—}05121836.1, YP_{—}003692877.1, ZP_{—}03517291.1, YP_{—}002974935.1, YP_{—}001668026.1, ADR61066.1, NP_{—}744329.1, YP_{—}001268866.1, YP_{—}004701637.1, ZP_{—}08142973.1, ADR62525.1, YP_{—}610700.1, NP_{—}747283.1, ADR62525.1, YP_{—}001270391.1, YP_{—}004704442.1, YP_{—}610700.1, YP_{—}001747156.1, ZP_{—}08138203.1, ZP_{—}07266194.1, EGH70821.1, YP_{—}351134.1, EGH32343.1, EGH08331.1, EGH67339.1, YP_{—}001668026.1, YP_{—}004701637.1, YP_{—}237931.1, ZP_{—}03400081.1, ZP_{—}05116783.1, ZP_{—}01550953.1, ZP_{—}07662787.1, YP_{—}928515.1, YP_{—}788372.1, YP_{—}001021095.1, ZP_{—}07797983.1, YP_{—}003578319.1, YP_{—}004305252.1, NP_{—}248912.1, ZP_{—}08636687.1, YP_{—}003912421.1, YP_{—}751687.1, ZP_{—}08142973.1, YP_{—}271307.1, ZP_{—}05082750.1, YP_{—}001417624.1, YP_{—}353455.1,
and especially preferably NP_{—}901695.1 (encoded by SEQ ID No. 132), YP_{—}353455.1,
and
proteins with a polypeptide sequence in which up to 60%, preferably up to 25%, especially preferably up to 15%, in particular up to 10, 9, 8, 7, 6, 5, 4, 3, 2, 1% of the amino acid residues are modified in comparison with the abovementioned reference sequences by deletion, insertion, substitution, or a combination thereof and which still have at least 50%, preferably 65%, especially preferably 80%, in particular more than 90%, of the activity of the protein with the corresponding abovementioned reference sequence, where 100% activity of the reference protein is understood as meaning the increase of the activity of the cells used as biocatalyst, that is to say the amount of substance reacted per unit time, based on the cell weight used (units per gram of cell dry weight [U/g CDW]), compared with the activity of the biocatalyst without the presence of the reference protein, where activity in this context and in the context of the determination of the activity of the enzyme Eₓᵢᵢᵢ is generally understood in particular as meaning the conversion of ω-oxo lauric acid and/or its methyl ester to give ω-amino lauric acid and/or its methyl ester.

### Eₓᵢᵥ, Auxiliary Enzyme for Eₓᵢᵢᵢ

[0140] For an increased activity of the enzyme Eₓᵢᵢᵢ, it may be beneficial to employ, in place of the enzyme Eₓᵢᵢᵢ alone, the combination of an enzyme Eₓᵢᵢᵢ paired with an enzyme Eₓᵢᵥ, which catalyses the conversion of an α-keto carboxylic acid to an amino acid, the enzyme Eₓᵢᵥ is preferably an amino acid dehydrogenase, such as, for example, serine dehydrogenases, aspartate dehydrogenases, phenylalanine dehydrogenases and glutamate dehydrogenases, especially preferably an alanine dehydrogenase of EC 1.4.1.1.

[0141] Such preferred alanine dehydrogenases are selected from among

EGR93259.1, YP_{—}004743277.1, YP_{—}004741620.1, YP_{—}004737294.1, YP_{—}002509853.1, YP_{—}002492255.1, YP_{—}002489845.1, YP_{—}002481919.1, YP_{—}001819330.1, YP_{—}004728333.1, ZP_{—}08670930.1, YP_{—}004672392.1, YP_{—}004467026.1, YP_{—}004326214.1, YP_{—}002349951.1, YP_{—}001674437.1, YP_{—}003921585.1, YP_{—}001699731.1, YP_{—}004720756.1, YP_{—}004719515.1, EGQ22316.1, EGQ21760.1, YP_{—}004689232.1, YP_{—}004698526.1, YP_{—}004694875.1, EGP67576.1, YP_{—}001832691.1, YP_{—}001760857.1, AEJ53875.1, AEJ42949.1, YP_{—}004392931.1, YP_{—}004404798.1, YP_{—}004374160.1, YP_{—}004303162.1, YP_{—}004196134.1, YP_{—}004178581.1, YP_{—}004163857.1, YP_{—}004161555.1, YP_{—}004099081.1, YP_{—}004101986.1, YP_{—}004042336.1, YP_{—}003994181.1, YP_{—}003966543.1, YP_{—}003913256.1, YP_{—}003825828.1, YP_{—}003806106.1, YP_{—}003686355.1, YP_{—}003678575.1, YP_{—}003654745.1, YP_{—}003651439.1, YP_{—}003637111.1, YP_{—}003631815.1, YP_{—}003300711.1, YP_{—}002886396.1, ZP_{—}03493991.1, YP_{—}001890813.1, YP_{—}001888849.1, YP_{—}001554753.1, YP_{—}001529018.1, YP_{—}001528954.1, YP_{—}001502090.1, YP_{—}001412833.1, YP_{—}001363812.1, YP_{—}923679.1, NP_{—}440110.1, ZP_{—}08640273.1, ZP_{—}08639751.1, ZP_{—}08637916.1, YP_{—}004171395.1, YP_{—}001366419.1, YP_{—}001327051.1, YP_{—}001262560.1, YP_{—}886996.1, YP_{—}882850.1, YP_{—}704410.1, YP_{—}703508.1, ZP_{—}08624689.1, YP_{—}001230376.1, P17557.1, P17556.1, CCB94892.1, CCB73698.1, YP_{—}001168635.1, YP_{—}004668736.1, YP_{—}911378.1, YP_{—}003686997.1, YP_{—}002263235.1, NP_{—}820115.1, YP_{—}004653761.1, YP_{—}004651159.1, YP_{—}003869397.1, YP_{—}004641708.1, YP_{—}004641134.1, YP_{—}001996597.1, YP_{—}001998297.1, YP_{—}001943676.1, YP_{—}001810799.1, YP_{—}004630087.1, YP_{—}004621893.1, YP_{—}004613083.1, ZP_{—}08621144.1, YP_{—}003954200.1, YP_{—}001372688.1, YP_{—}001233686.1, ZP_{—}08594848.1, ZP_{—}08586665.1, ZP_{—}08578896.1, ZP_{—}08575937.1, YP_{—}004604438.1, YP_{—}004600931.1, ZP_{—}08569139.1, ZP_{—}08566255.1, AEB25326.1, YP_{—}374584.1, YP_{—}004216732.1, ZP_{—}06806151.1, ZP_{—}06440291.1, ZP_{—}06369993.1, ZP_{—}06254238.1, ZP_{—}05844252.1, ZP_{—}05472927.1, ZP_{—}05365401.1, ZP_{—}04747945.1, ZP_{—}04678933.1, ZP_{—}03779761.1, ZP_{—}03728859.1, ZP_{—}03711891.1, ZP_{—}03697269.1, ZP_{—}01628294.1, ZP_{—}01546224.1, ZP_{—}01444021.1, ZP_{—}01308570.1, ZP_{—}01228194.1, ZP_{—}01164841.1, ZP_{—}01114638.1, YP_{—}004566582.1, YP_{—}004572166.1, YP_{—}004571401.1, YP_{—}004569425.1, YP_{—}003513168.1, YP_{—}004561169.1, ZP_{—}08554945.1, YP_{—}400777.1, ZP_{—}08533479.1, ZP_{—}08533412.1, ZP_{—}08525779.1, ZP_{—}08523693.1, YP_{—}004471329.1, YP_{—}004368103.1, YP_{—}001536790.1, YP_{—}001158763.1, YP_{—}662032.1, YP_{—}967824.1, YP_{—}004542206.1, YP_{—}002958019.1, YP_{—}645630.1, ZP_{—}08520595.1, AEG81976.1, YP_{—}002560779.1, YP_{—}496956.1, YP_{—}411850.1, YP_{—}300065.1, NP_{—}840123.1, ZP_{—}08514775.1, YP_{—}002250769.1, YP_{—}002155665.1, YP_{—}002137991.1, YP_{—}001135275.1, YP_{—}001070365.1, YP_{—}639268.1, NP_{—}864377.1, YP_{—}004554709.1, YP_{—}004546384.1, YP_{—}004544159.1, ZP_{—}01448725.1, ZP_{—}01255407.1, EGL88594.1, EGL87587.1, YP_{—}004536059.1, ZP_{—}08512666.1, ZP_{—}08501410.1, ZP_{—}08493566.1, ZP_{—}08486369.1, YP_{—}004497891.1, YP_{—}004494473.1, YP_{—}003945301.1, YP_{—}003835539.1, YP_{—}003634898.1, YP_{—}003503876.1, ZP_{—}06503131.1, YP_{—}003376450.1, YP_{—}003409976.1, YP_{—}003409004.1, YP_{—}003395275.1, YP_{—}003393138.1, YP_{—}003387714.1, YP_{—}003382934.1, ZP_{—}05760008.1, ZP_{—}05300490.1, ZP_{—}04387987.1, ZP_{—}03725713.1, YP_{—}002134125.1, YP_{—}001618802.1, ZP_{—}01899015.1, ZP_{—}01881250.1, ZP_{—}01731833.1, YP_{—}004529602.1, YP_{—}004512974.1, YP_{—}004479110.1, YP_{—}004434722.1, YP_{—}004430602.1, CBX28458.1, ZP_{—}05217624.1, ZP_{—}01074124.1, ZP_{—}01062209.1, ZP_{—}01011939.1, ZP_{—}00956754.1, YP_{—}388045.1, ZP_{—}07910902.1, ZP_{—}07835291.1, ZP_{—}07831081.1, ZP_{—}07704117.1, ZP_{—}07112933.1, ZP_{—}06860168.1, ZP_{—}05915689.1, YP_{—}002352943.1, YP_{—}826544.1, YP_{—}004087624.1, ADP99134.1, YP_{—}003590847.1, YP_{—}003589189.1, YP_{—}001192379.1, ZP_{—}08473868.1, ZP_{—}08469833.1, ZP_{—}08462614.1, ZP_{—}07709417.1, ZP_{—}07672507.1, ZP_{—}07608107.1, ZP_{—}07404685.1, ZP_{—}07334010.1, ZP_{—}07333254.1, ZP_{—}06888732.1, ZP_{—}06837313.1, YP_{—}873046.1, YP_{—}004060177.1, YP_{—}004007860.1, YP_{—}003492711.1, ZP_{—}08456143.1, YP_{—}003675989.1, YP_{—}003159562.1, NP_{—}302068.1, YP_{—}004461013.1, ZP_{—}08426378.1, ZP_{—}08422563.1, YP_{—}004122643.1, YP_{—}004077807.1, YP_{—}004058618.1, YP_{—}004055696.1, YP_{—}003898888.1, YP_{—}003575339.1, ZP_{—}06186049.1, YP_{—}003314861.1, YP_{—}003148148.1, YP_{—}002786543.1, YP_{—}001661762.1, YP_{—}001666058.1, YP_{—}001549204.1, YP_{—}001518627.1, YP_{—}004453289.1, YP_{—}004450492.1, YP_{—}004301609.1, YP_{—}465316.1, ZP_{—}08411512.1, YP_{—}001394062.1, YP_{—}001035553.1, YP_{—}417038.1, YP_{—}301147.1, YP_{—}014199.1, EGJ45059.1, EGJ36821.1, EGJ36552.1, EGJ19019.1, ZP_{—}08388916.1, YP_{—}004427278.1, YP_{—}003909234.1, YP_{—}002536659.1, YP_{—}001940410.1, YP_{—}001329977.1, YP_{—}001323343.1, YP_{—}001114195.1, YP_{—}001096594.1, YP_{—}949547.1, YP_{—}756289.1, YP_{—}722774.1, YP_{—}525283.1, YP_{—}461225.1, YP_{—}320697.1, YP_{—}289022.1, YP_{—}075651.1, NP_{—}988633.1, YP_{—}004399762.1, YP_{—}004335185.1, ADX76365.1, YP_{—}004203407.1, YP_{—}001917832.1, YP_{—}001642542.1, ZP_{—}08332142.1, YP_{—}041174.1, ZP_{—}08328264.1, YP_{—}004225082.1, EGG96712.1, ZP_{—}08311476.1, ZP_{—}08310170.1, ZP_{—}08267322.1, ZP_{—}08263846.1, ZP_{—}07898723.1, YP_{—}003273311.1, ZP_{—}05909597.1, YP_{—}003073095.1, YP_{—}003022905.1, YP_{—}003013384.1, YP_{—}003011072.1, ZP_{—}04777180.1, ZP_{—}04432601.1, YP_{—}001016505.1, YP_{—}953175.1, YP_{—}731492.1, ZP_{—}08302086.1, ZP_{—}08296718.1, ZP_{—}08285373.1, ZP_{—}08280138.1, ZP_{—}08270040.1, ZP_{—}08261780.1, ZP_{—}08258406.1, ZP_{—}08246570.1, YP_{—}003113209.1, YP_{—}002436565.1, ZP_{—}04409790.1, YP_{—}428767.1, EGG40837.1, CCA54694.1, YP_{—}004147180.1, YP_{—}550034.1, YP_{—}173042.1, EGF75662.1, YP_{—}004205024.1, YP_{—}003670363.1, YP_{—}003476027.1, YP_{—}003241464.1, YP_{—}863990.1, YP_{—}004149630.1, YP_{—}003646700.1, EGF24326.1, BAK15593.1, YP_{—}003991014.1, YP_{—}003988127.1, YP_{—}003722297.1, YP_{—}003254539.1, YP_{—}003251916.1, NP_{—}901692.1, EGF16043.1, EGF07290.1, YP_{—}003048854.1, YP_{—}149301.1, YP_{—}148605.1, YP_{—}004340432.1, EFT09946.1, EFS80513.1, EFS51332.1, EFS42459.1, YP_{—}003060895.1, YP_{—}003059033.1, ZP_{—}03305373.1, YP_{—}002379520.1, YP_{—}372555.1, NP_{—}085655.1, YP_{—}004321492.1, ZP_{—}08239446.1, YP_{—}003817108.1, YP_{—}002951286.1, YP_{—}002950656.1, YP_{—}002522266.1, YP_{—}001982538.1, YP_{—}001127463.1, YP_{—}001126767.1, NP_{—}764939.1, NP_{—}761756.1, NP_{—}244046.1, NP_{—}243195.1, YP_{—}003194671.1, YP_{—}003161559.1, YP_{—}002797803.1, YP_{—}002634404.1, YP_{—}439119.1, YP_{—}314402.1, YP_{—}143482.1, NP_{—}295618.1, ZP_{—}08215173.1, YP_{—}004282846.1, YP_{—}004267961.1, YP_{—}001867313.1, YP_{—}001301882.1, YP_{—}847214.1, YP_{—}004095847.1, YP_{—}003338282.1, YP_{—}003337256.1, YP_{—}355846.1, YP_{—}253131.1, ZP_{—}08197563.1, ZP_{—}08196283.1, ADW06447.1, YP_{—}003370508.1, YP_{—}003317645.1, YP_{—}003184411.1, YP_{—}003198349.1, YP_{—}003084639.1, YP_{—}004294565.1, YP_{—}004243057.1, CBZ55377.1, EGC26795.1, EGC25718.1, EGC23378.1, ZP_{—}07887872.1, YP_{—}003269716.1, YP_{—}003203632.1, YP_{—}003199972.1, YP_{—}003153148.1, YP_{—}003146304.1, YP_{—}002893498.1, ZP_{—}03230841.1, ZP_{—}03229411.1, YP_{—}001050520.1, YP_{—}963387.1, YP_{—}927645.1, YP_{—}869684.1, YP_{—}734091.1, NP_{—}372233.1, NP_{—}102173.1, ZP_{—}08170259.1, EGD36706.1, EGD32748.1, ZP_{—}08155540.1, YP_{—}004142849.1, YP_{—}002417649.1, YP_{—}001301040.1, YP_{—}001211208.1, YP_{—}266230.1, ZP_{—}08145165.1, YP_{—}001801454.1, YP_{—}001736003.1, YP_{—}833487.1, YP_{—}831236.1, YP_{—}384064.1, YP_{—}094958.1, YP_{—}009793.1, NP_{—}975075.1, NP_{—}847074.1, EGC82166.1, YP_{—}004261609.1, YP_{—}004255502.1, YP_{—}678603.1, YP_{—}004181700.1, ZP_{—}08122013.1, ADT87541.1, YP_{—}003524764.1, YP_{—}002992990.1, YP_{—}002992892.1, YP_{—}081348.1, YP_{—}080482.1, YP_{—}002476349.1, ZP_{—}08115025.1, ZP_{—}08114403.1, YP_{—}003552869.1, YP_{—}002358112.1, ZP_{—}08111138.1, YP_{—}003770046.1, YP_{—}003103898.1, ZP_{—}08101069.1, ZP_{—}08097706.1, ZP_{—}08094005.1, YP_{—}003167240.1, YP_{—}002371817.1, YP_{—}004231854.1, EGA98455.1, YP_{—}002430239.1, ZP_{—}01049900.1, NP_{—}769819.1, NP_{—}768378.1, YP_{—}001143837.1, YP_{—}001108475.1, YP_{—}906040.1, YP_{—}726477.1, YP_{—}575010.1, YP_{—}477594.1, YP_{—}474564.1, YP_{—}130399.1, YP_{—}129373.1, YP_{—}123314.1, NP_{—}810467.1, NP_{—}646469.1, NP_{—}626044.1, NP_{—}391071.1, ZP_{—}08086822.1, ZP_{—}08084776.1, ZP_{—}08083119.1, NP_{—}465104.1, NP_{—}374819.1, NP_{—}337355.1, NP_{—}217296.1, ZP_{—}08072064.1, YP_{—}004197762.1, ZP_{—}08065558.1, ZP_{—}08063535.1, ZP_{—}08061612.1, ZP_{—}08059482.1, ZP_{—}08057644.1, ZP_{—}08055701.1, ZP_{—}08049025.1, ZP_{—}08047015.1, ZP_{—}04062925.1, YP_{—}269473.1, ZP_{—}08033402.1, ZP_{—}07829339.1, ZP_{—}06603053.1, ZP_{—}08020768.1, ZP_{—}08013590.1, ZP_{—}08011832.1, YP_{—}003783744.1, YP_{—}002781576.1, YP_{—}002780533.1, ZP_{—}02195873.1, NP_{—}797482.1, ZP_{—}08006697.1, ZP_{—}08006365.1, ZP_{—}08005962.1, ZP_{—}08004522.1, EFV89241.1, ZP_{—}07980135.1, ZP_{—}07974222.1, ZP_{—}07970379.1, ZP_{—}07962751.1, ZP_{—}07953732.1, ZP_{—}07945354.1, ZP_{—}06273519.1, YP_{—}003428808.1, YP_{—}003426902.1, YP_{—}001711555.1, YP_{—}001703831.1, YP_{—}001621081.1, YP_{—}001223643.1, YP_{—}001228127.1, YP_{—}849789.1, YP_{—}759696.1, NP_{—}969291.1, NP_{—}896596.1, NP 470950.1, YP_{—}359521.1, ZP_{—}01946735.1, ZP_{—}03631968.1, ZP_{—}01101833.1, YP_{—}002826017.1, YP_{—}003796926.1, ZP_{—}07873974.1, ZP_{—}07870908.1, ZP_{—}07645051.1, ZP_{—}07643260.1, ZP_{—}06611917.1, AAT40119.1, ZP_{—}07864946.1, YP_{—}004068409.1, YP_{—}002796203.1, YP_{—}002774420.1, YP_{—}003600348.1, YP_{—}003599946.1, YP_{—}003565624.1, YP_{—}003565223.1, YP_{—}335198.1, YP_{—}423850.1, YP_{—}155059.1, ZP_{—}07843538.1, ZP_{—}07841226.1, ZP_{—}03566837.1, EFS39373.1, EFS35044.1, ZP_{—}05287373.1, ZP_{—}05280407.1, ZP_{—}05224249.1, ZP_{—}04701236.1, ZP_{—}04692180.1, ZP_{—}03561728.1, ZP_{—}03227314.1, ZP_{—}02931419.1, ZP_{—}02731551.1, ZP_{—}02465413.1, ZP_{—}02451335.1, ZP_{—}02384332.1, ZP_{—}02381808.1, ZP_{—}02330643.1, YP_{—}004047600.1, EFR99988.1, EFR93766.1, EFR90643.1, EFR84459.1, ZP_{—}04059923.1, ZP_{—}03613601.1, ZP_{—}07743242.1, ZP_{—}07740118.1, ZP_{—}07728760.1, ZP_{—}07728640.1, YP_{—}003557047.1, ZP_{—}07204792.1, ZP_{—}07033145.1, ZP_{—}06949396.1, ZP_{—}06928932.1, ZP_{—}05692073.1, ZP_{—}05687006.1, ZP_{—}04867480.1, YP_{—}775531.1, CBE70214.1, ZP_{—}07721182.1, CBW22027.1, BAJ31519.1, ZP_{—}07694389.1, ZP_{—}07653390.1, ZP_{—}07548028.1, ZP_{—}07547185.1, ZP_{—}07462497.1, ZP_{—}07458778.1, ZP_{—}07399459.1, ZP_{—}07397253.1, ZP_{—}07397250.1, ZP_{—}07390390.1, ZP_{—}07390003.1, ZP_{—}07388675.1, ZP_{—}07367724.1, ZP_{—}07206561.1, ZP_{—}07053170.1, ZP_{—}07048770.1, ZP_{—}06873224.1, ZP_{—}06852862.1, ZP_{—}06427630.1, ZP_{—}06307332.1, ZP_{—}06252577.1, ZP_{—}06175164.1, ZP_{—}06080808.1, ZP_{—}06052314.1, ZP_{—}06033748.1, ZP_{—}05945907.1, ZP_{—}05924840.1, ZP_{—}05885109.1, ZP_{—}05882095.1, ZP_{—}05877865.1, ZP_{—}05855512.1, ZP_{—}05745159.1, ZP_{—}05716384.1, ZP_{—}04866524.1, ZP_{—}04819572.1, ZP_{—}04797418.1, ZP_{—}04319784.1, ZP_{—}04302850.1, ZP_{—}04298961.1, ZP_{—}04287684.1, ZP_{—}04277177.1, ZP_{—}04248389.1, ZP_{—}04235899.1, ZP_{—}04230016.1, ZP_{—}04226233.1, ZP_{—}04219330.1, ZP_{—}04216141.1, ZP_{—}04209092.1, ZP_{—}04188247.1, ZP_{—}04184510.1, ZP_{—}04176651.1, ZP_{—}04172877.1, ZP_{—}04170954.1, ZP_{—}04166021.1, ZP_{—}04160852.1, ZP_{—}04158983.1, ZP_{—}04154769.1, ZP_{—}04153266.1, ZP_{—}04149717.1, ZP_{—}04122524.1, ZP_{—}04110635.1, ZP_{—}04109769.1, ZP_{—}04109049.1, ZP_{—}04108444.1, ZP_{—}04104350.1, ZP_{—}04100460.1, ZP_{—}04075249.1, ZP_{—}04074263.1, ZP_{—}04009917.1, ZP_{—}03916440.1, ZP_{—}03703407.1, ZP_{—}03675960.1, ZP_{—}03588177.1, ZP_{—}03569636.1, ZP_{—}03497916.1, ZP_{—}03459468.1, ZP_{—}03299979.1, ZP_{—}03127493.1, ZP_{—}03054334.1, ZP_{—}03015779.1, ZP_{—}02478038.1, ZP_{—}02434435.1, ZP_{—}01891777.1, ZP_{—}01134782.1, ZP_{—}01084087.1, ZP_{—}00959435.1, ZP_{—}06021901.1, ZP_{—}02908521.1, ZP_{—}02892318.1, ZP_{—}02883918.1, ZP_{—}02433787.1, ZP_{—}02428013.1, ZP_{—}02424229.1, ZP_{—}02420399.1, ZP_{—}02190089.1, ZP_{—}02184200.1, ZP_{—}02166566.1, ZP_{—}02159718.1, ZP_{—}02152178.1, ZP_{—}02147727.1, ZP_{—}02144676.1, ZP_{—}02078507.1, ZP_{—}02072824.1, ZP_{—}02067293.1, ZP_{—}02061844.1, ZP_{—}01996280.1, ZP_{—}01991915.1, ZP_{—}01958087.1, ZP_{—}01908911.1, ZP_{—}01901606.1, ZP_{—}01895406.1, ZP_{—}01872936.1, ZP_{—}01870578.1, ZP_{—}01863314.1, ZP_{—}01859623.1, ZP_{—}01852574.1, ZP_{—}01834861.1, ZP_{—}01816459.1, ZP_{—}01770050.1, ZP_{—}01754550.1, ZP_{—}01750331.1, ZP_{—}01746097.1, ZP_{—}01736276.1, ZP_{—}01723571.1, ZP_{—}01688551.1, ZP_{—}01666824.1, ZP_{—}01627178.1, ZP_{—}01623088.1, ZP_{—}01612926.1, ZP_{—}01470938.1, ZP_{—}01460341.1, ZP_{—}01452344.1, ZP_{—}01439206.1, ZP_{—}01386817.1, ZP_{—}01313561.1, ZP_{—}01304248.1, ZP_{—}01264036.1, ZP_{—}01261877.1, ZP_{—}01235013.1, ZP_{—}01233072.1, ZP_{—}01224625.1, ZP_{—}01223017.1, ZP_{—}01221216.1, ZP_{—}01215557.1, ZP_{—}01202668.1, ZP_{—}01159834.1, ZP_{—}01158968.1, ZP_{—}01157579.1, ZP_{—}01130649.1, ZP_{—}01126987.1, ZP_{—}01122900.1, ZP_{—}01118752.1, ZP_{—}01090470.1, ZP_{—}01067027.1, ZP_{—}01058751.1, ZP_{—}01043459.1, ZP_{—}01041526.1, ZP_{—}01036767.1, ZP_{—}01001935.1, ZP_{—}00995212.1, ZP_{—}00992904.1, ZP_{—}00962062.1, ZP_{—}00952239.1, ZP_{—}00741173.1, ZP_{—}00740055.1, ZP_{—}00738801.1, ZP_{—}00517716.1, ZP_{—}00231205.1, ZP_{—}00208007.1, YP_{—}003974610.1, YP_{—}003546595.1, YP_{—}002317127.1, ZP_{—}07313778.1, ZP_{—}07302778.1, ZP_{—}07298850.1, ZP_{—}07285992.1, ZP_{—}07282306.1, ZP_{—}07279420.1, ZP_{—}07270582.1, ZP_{—}07001670.1, YP_{—}003706150.1, ZP_{—}06916083.1, ZP_{—}06912607.1, ZP_{—}06707160.1, ZP_{—}06324727.1, ZP_{—}06199155.1, ZP_{—}06197322.1, ZP_{—}05788488.1, ZP_{—}05785587.1, ZP_{—}05779471.1, ZP_{—}05739072.1, ZP_{—}05649780.1, ZP_{—}05647025.1, ZP_{—}05546023.1, ZP_{—}05341228.1, ZP_{—}05256588.1, ZP_{—}05127284.1, ZP_{—}05121710.1, ZP_{—}05119732.1, ZP_{—}05105668.1, ZP_{—}05101668.1, ZP_{—}05095370.1, ZP_{—}05090860.1, ZP_{—}05080646.1, ZP_{—}05076859.1, ZP_{—}05069222.1, ZP_{—}05065142.1, ZP_{—}05056378.1, ZP_{—}05052029.1, ZP_{—}05046506.1, ZP_{—}05037402.1, ZP_{—}05033610.1, ZP_{—}05026858.1, ZP_{—}05001187.1, ZP_{—}04959306.1, ZP_{—}04947229.1, ZP_{—}04941878.1, ZP_{—}04896669.1, ZP_{—}04890139.1, ZP_{—}04852481.1, ZP_{—}04849996.1, ZP_{—}04608704.1, ZP_{—}04581931.1, ZP_{—}04555275.1, ZP_{—}04553607.1, ZP_{—}04545440.1, ZP_{—}04538537.1, YP_{—}002311919.1, ZP_{—}01052096.1, YP_{—}432286.1, ZP_{—}07039851.1, ZP_{—}07036831.1, ZP_{—}07035634.1, ZP_{—}06826623.1, ZP_{—}06202690.1, ZP_{—}06091438.1, ZP_{—}06060476.1, YP_{—}002955941.1, YP_{—}002764322.1, YP_{—}002761274.1, YP_{—}002754767.1, YP_{—}002605829.1, YP_{—}002544281.1, YP_{—}002453687.1, YP_{—}002444060.1, YP_{—}002369417.1, YP_{—}002365390.1, YP_{—}002297006.1, YP_{—}002233968.1, YP_{—}001861152.1, YP_{—}001850232.1, YP_{—}001827236.1, YP_{—}001815332.1, YP_{—}001661116.1, YP_{—}001647239.1, YP_{—}001643400.1, YP_{—}001625970.1, YP_{—}001584357.1, YP_{—}001488077.1, YP_{—}001473862.1, YP_{—}001450010.1, YP_{—}001444991.1, YP_{—}001424576.1, YP_{—}001422460.1, YP_{—}001376512.1, YP_{—}001373857.1, YP_{—}001217438.1, YP_{—}001155448.1, YP_{—}001117213.1, YP_{—}001094151.1, YP_{—}950353.1, YP_{—}949946.1, YP_{—}944887.1, YP_{—}854776.1, YP_{—}837848.1, YP_{—}795217.1, YP_{—}750481.1, YP_{—}746463.1, YP_{—}681383.1, YP_{—}673989.1, YP_{—}632321.1, YP_{—}624008.1, YP_{—}615612.1, YP_{—}611857.1, YP_{—}604242.1, YP_{—}562748.1, YP_{—}536656.1, YP_{—}517218.1, YP_{—}459264.1, YP_{—}382475.1, YP_{—}340233.1, YP_{—}295387.1, YP_{—}285355.1, YP_{—}204286.1, YP_{—}174267.1, YP_{—}165491.1, YP_{—}126314.1, YP_{—}111103.1, YP_{—}098760.1, YP_{—}082111.1, YP_{—}064280.1, YP_{—}064276.1, YP_{—}062161.1, YP_{—}056928.1, YP_{—}008485.1, YP_{—}005739.1, NP_{—}961822.1, NP_{—}953341.1, NP_{—}926915.1, NP_{—}875991.1, NP_{—}834329.1, NP_{—}830409.1, NP_{—}827683.1, NP_{—}694147.1, NP_{—}693109.1, NP_{—}682897.1, NP_{—}661601.1, NP_{—}621858.1, NP_{—}486395.1, NP_{—}385730.1, NP_{—}231539.1, ADL65712.1, XP_{—}003087064.1, YP_{—}003886520.1, YP_{—}003699559.1, YP_{—}003516134.1, ADI98200.1, BAI86717.1, YP_{—}003794343.1, YP_{—}003790454.1, ADI11356.1, YP_{—}003845821.1, ADK69870.1, YP_{—}003784546.1, CBW36497.1, CBW26165.1, YP_{—}003709979.1, CAQ50186.1, ZP_{—}06770463.1, CBK69442.1, YP_{—}003413835.1, YP_{—}003595089.1, ZP_{—}06807811.1, YP_{—}003582455.1, YP_{—}003464731.1, YP_{—}003496397.1, YP_{—}003421918.1, CBL07274.1, CBK64956.1, YP_{—}003508515.1, AAL87460.1, AAC23579.1, AAC23578.1, AAC23577.1, ACU78652.1, YP_{—}003471439.1, YP_{—}003452777.1, ZP_{—}06384971.1, ACY25368.1, ABC26869.1, AAP44334.1, EEZ80018.1, ZP_{—}05110458.1, 1PJB_A, ZP_{—}04717201.1, ZP_{—}04689103.1, ZP_{—}04658071.1, XP_{—}002364705.1, ACN89388.1, 2VHW_A, 2VHV_A, XP_{—}001324625.1, ABZ06259.1, ABR57171.1, CAO90307.1, CAM75354.1, CAA44791.1, BAA77513.1, EGR96638.1, EGR94699.1, ZP_{—}08693646.1, YP_{—}004740306.1, YP_{—}004738947.1, AEE73472.1, YP_{—}002478771.1, YP_{—}002018970.1, YP_{—}001953230.1, ZP_{—}08683223.1, YP_{—}004073823.1, EGQ99856.1, ZP_{—}08664912.1, EGQ79321.1, YP_{—}001681700.1, AEJ51356.1, YP_{—}004378292.1, YP_{—}004237802.1, YP_{—}004166920.1, YP_{—}004043011.1, YP_{—}003997728.1, YP_{—}002975437.1, YP_{—}002514072.1, YP_{—}001433829.1, YP_{—}001185975.1, YP_{—}004676549.1, YP_{—}004016358.1, YP_{—}911347.1, YP_{—}004658403.1, YP_{—}002015455.1, YP_{—}001996171.1, YP_{—}001998271.1, YP_{—}001960099.1, YP_{—}001942826.1, YP_{—}001130666.1, YP_{—}004608353.1, YP_{—}508400.1, YP_{—}374553.1, ZP_{—}06298411.1, ZP_{—}06044299.1, ZP_{—}04390473.1, ZP_{—}04055222.1, ZP_{—}03779980.1, ZP_{—}03729400.1, ZP_{—}03390832.1, YP_{—}004580682.1, YP_{—}001988281.1, YP_{—}644219.1, YP_{—}665459.1, NP_{—}895289.1, YP_{—}004275231.1, NP_{—}208189.1, BAJ60529.1, BAJ59008.1, BAJ57509.1, BAJ56032.1, ZP_{—}01254396.1, YP_{—}445036.1, EGL90046.1, YP_{—}004510847.1, ZP_{—}08450330.1, YP_{—}003387804.1, YP_{—}003058152.1, ZP_{—}03438664.1, ZP_{—}01884341.1, AEG33860.1, YP_{—}004429375.1, ZP_{—}08459444.1, ZP_{—}07909193.1, ZP_{—}07908670.1, EFT26139.1, EFT23947.1, EFT12708.1, EFT03750.1, EFS82814.1, EFS74272.1, EFS67128.1, ZP_{—}06844564.1, YP_{—}826658.1, YP_{—}001195249.1, YP_{—}003095978.1, YP_{—}469292.1, YP_{—}004442054.1, YP_{—}004461174.1, YP_{—}004055616.1, YP_{—}003576656.1, YP_{—}003094537.1, YP_{—}001295973.1, AEE71143.1, YP_{—}004447480.1, YP_{—}001978005.1, ZP_{—}08413507.1, ZP_{—}07820264.1, YP_{—}416780.1, EGI86036.1, YP_{—}003109321.1, YP_{—}001275268.1, YP_{—}380171.1, YP_{—}159073.1, YP_{—}004203456.1, YP_{—}003761844.1, YP_{—}040853.1, ZP_{—}08328557.1, CBL87253.1, CBL87167.1, YP_{—}004316768.1, EFS92548.1, YP_{—}001016505.1, EGG67688.1, YP_{—}003528837.1, YP_{—}002434942.1, YP_{—}117835.1, YP_{—}004150583.1, YP_{—}003755105.1, YP_{—}002526442.1, YP_{—}003120958.1, EGE94241.1, YP_{—}004345416.1, EFS79952.1, ZP_{—}06964253.1, EGE60050.1, CBZ52359.1, ADU40304.1, ADQ77229.1, YP_{—}003196038.1, YP_{—}144713.1, YP_{—}001304143.1, YP_{—}113082.1, ADO76516.1, YP_{—}003326349.1, YP_{—}003289755.1, YP_{—}003089327.1, ZP_{—}07911965.1, ZP_{—}05773583.1, ZP_{—}05765271.1, YP_{—}003154888.1, YP_{—}003142045.1, YP_{—}002280953.1, NP_{—}371963.1, NP_{—}422368.1, EGC98966.1, EGC76398.1, YP_{—}004263661.1, YP_{—}004252039.1, YP_{—}679036.1, YP_{—}499973.1, ZP_{—}08090745.1, ZP_{—}08108339.1, YP_{—}001531594.1, ZP_{—}01051588.1, NP_{—}646145.1, NP_{—}224146.1, ZP_{—}08054972.1, ZP_{—}08053009.1, YP_{—}003584878.1, ZP_{—}07939405.1, ZP_{—}03439290.1, ADU82392.1, ADU83943.1, ADU85424.1, ADU80668.1, YP_{—}001225733.1, YP_{—}003863039.1, ZP_{—}01061682.1, YP_{—}767568.1, ZP_{—}07865749.1, ZP_{—}06858058.1, YP_{—}628213.1, EFT81350.1, EFT66610.1, EFT51424.1, ZP_{—}04839161.1, ZP_{—}05633406.1, ZP_{—}05288381.1, AAR37813.1, EFS03282.1, EFS03278.1, YP_{—}004046539.1, ZP_{—}07749550.1, ZP_{—}07729731.1, ADN80650.1, ZP_{—}07088856.1, ZP_{—}07080219.1, ZP_{—}06949721.1, ZP_{—}05685436.1, YP_{—}002550450.1, YP_{—}803715.1, ZP_{—}07720023.1, ZP_{—}07469700.1, ZP_{—}07365619.1, ZP_{—}06924335.1, ZP_{—}06715776.1, ZP_{—}06303722.1, ZP_{—}06303721.1, ZP_{—}06264319.1, ZP_{—}06155528.1, ZP_{—}05745707.1, ZP_{—}04866244.1, ZP_{—}04199629.1, ZP_{—}04195783.1, ZP_{—}04067276.1, ZP_{—}03968868.1, ZP_{—}03963857.1, ZP_{—}03933079.1, ZP_{—}03497046.1, ZP_{—}03475134.1, ZP_{—}01890152.1, ZP_{—}01086712.1, ZP_{—}06021845.1, ZP_{—}02183427.1, ZP_{—}02162695.1, ZP_{—}02032824.1, ZP_{—}01993906.1, ZP_{—}01993127.1, ZP_{—}01983694.1, ZP_{—}01972527.1, ZP_{—}01819838.1, ZP_{—}01817962.1, ZP_{—}01740947.1, ZP_{—}01734991.1, ZP_{—}01694775.1, ZP_{—}01678972.1, ZP_{—}01468566.1, ZP_{—}01408749.1, ZP_{—}01386800.1, ZP_{—}01202184.1, ZP_{—}01174108.1, ZP_{—}01174047.1, ZP_{—}01118729.1, ZP_{—}01081268.1, ZP_{—}00998573.1, ZP_{—}00739793.1, YP_{—}002302140.1, ZP_{—}07358151.1, ZP_{—}06668925.1, ZP_{—}06668924.1, ZP_{—}06667106.1, ZP_{—}06324464.1, ZP_{—}06196777.1, ZP_{—}05114159.1, ZP_{—}05083968.1, ZP_{—}05070370.1, ZP_{—}05030022.1, ZP_{—}04673064.1, ZP_{—}04581752.1, ZP_{—}01052079.1, ZP_{—}07661104.1, ZP_{—}06077819.1, YP_{—}002835579.1, YP_{—}002267069.1, YP_{—}002129114.1, YP_{—}001929236.1, YP_{—}001910999.1, YP_{—}001854051.1, YP_{—}001094152.1, YP_{—}001044252.1, YP_{—}861818.1, YP_{—}915522.1, YP_{—}807371.1, YP_{—}353800.1, YP_{—}342402.1, YP_{—}065168.1, YP_{—}015797.1, YP_{—}005051.1, NP_{—}856449.1, NP_{—}661547.1, NP_{—}358448.1, YP_{—}003929442.1, YP_{—}003927769.1, ADO06185.1, ADO04689.1, ADL23243.1, YP_{—}003789202.1, ADJ79786.1, YP_{—}003516488.1, ADI97953.1, ADI35485.1, YP_{—}003716800.1, ZP_{—}00241359.1, YP_{—}003718040.1, CAQ49862.1, YP_{—}003282331.1, AAP97897.1, ACX99978.1, ACX98578.1, YP_{—}003472544.1, ZP_{—}06382734.1, EEZ79852.1, ZP_{—}05299989.1, ZP_{—}05299895.1, XP_{—}002367632.1, ZP_{—}03529835.1, ZP_{—}03517011.1, ZP_{—}03505783.1, XP_{—}001310698.1, ABK27691.1, CAB59281.2,
in particular NP_{—}391071.1, BAI86717.1, YP_{—}004205024.1, ZP_{—}06873224.1, YP_{—}003974610.1, YP_{—}001422460.1, AEB25326.1, YP_{—}003921585.1, YP_{—}080482.1, ZP_{—}03054334.1, YP_{—}001488077.1, YP_{—}081348.1, YP_{—}003426902.1, NP_{—}243195.1, ZP_{—}08004522.1, YP_{—}003565624.1, YP_{—}004095847.1, YP_{—}003600348.1, ZP_{—}08006697.1, ZP_{—}04248389.1, YP_{—}174267.1, YP_{—}001376512.1, ZP_{—}04226233.1, ZP_{—}04100460.1, YP_{—}002369417.1, ZP_{—}03229411.1, ZP_{—}04110635.1, ZP_{—}04287684.1, ZP_{—}04172877.1, ZP_{—}04158983.1, ZP_{—}04219330.1, NP_{—}830409.1, YP_{—}003790454.1, ZP_{—}04184510.1, YP_{—}001642542.1, ZP_{—}04074263.1, ZP_{—}04319784.1, NP_{—}847074.1, YP_{—}001373857.1, ZP_{—}04122524.1, ZP_{—}03230841.1, YP_{—}082111.1, NP_{—}834329.1, YP_{—}002444060.1, ZP_{—}04170954.1, YP_{—}002453687.1, ZP_{—}04153266.1, ZP_{—}04302850.1, YP_{—}002365390.1, ZP_{—}04216141.1, ZP_{—}04298961.1, ZP_{—}00740055.1, ZP_{—}04277177.1, ZP_{—}04104350.1, ZP_{—}04176651.1, YP_{—}001647239.1, ZP_{—}04188247.1, ZP_{—}04149717.1, YP_{—}003794343.1, ZP_{—}04230016.1, YP_{—}001643400.1, ZP_{—}04209092.1, ZP_{—}04235899.1, YP_{—}003428808.1, ZP_{—}08005962.1, YP_{—}003599946.1, YP_{—}003565223.1, ZP_{—}01859623.1, YP_{—}004569425.1, ZP_{—}04432601.1, ZP_{—}03227314.1, YP_{—}003699559.1, ZP_{—}07709417.1, ZP_{—}01723571.1, NP_{—}244046.1, ZP_{—}08006365.1, ZP_{—}00738801.1, ZP_{—}04160852.1, ZP_{—}04166021.1, ZP_{—}04154769.1, ZP_{—}04109769.1, ZP_{—}04109049.1, ZP_{—}04108444.1, ZP_{—}04075249.1, ZP_{—}00741173.1, ZP_{—}00739793.1, ZP_{—}01174108.1, ZP_{—}01174047.1, ZP_{—}00241359.1, ZP_{—}04195783.1, ZP_{—}04199629.1, ZP_{—}04067276.1
and especially preferably NP_{—}391071.1.
and
proteins with a polypeptide sequence in which up to 60%, preferably up to 25%, especially preferably up to 15%, in particular up to 10, 9, 8, 7, 6, 5, 4, 3, 2, 1% of the amino acid residues are modified in comparison with the abovementioned reference sequences by deletion, insertion, substitution, or a combination thereof and which still have at least 50%, preferably 65%, especially preferably 80%, in particular more than 90%, of the activity of the protein with the corresponding abovementioned reference sequence, where 100% activity of the reference protein is understood as meaning the increase of the activity of the cells used as biocatalyst, that is to say the amount of substance reacted per unit time, based on the cell weight used (units per gram of cell dry weight [U/g CDW]), compared with the activity of the biocatalyst without the presence of the reference protein, to be more precise in a system in which pyruvate is converted into alanine.

### Fifth Genetic Modification for Suppressing the Degradation of Carboxylic Acids and Carboxylic Acid Derivatives

[0142] Furthermore preferred according to the invention are microorganisms which include a fifth genetic modification which comprises an activity of at least one of the enzymes selected from the group

Eₐ acyl-CoA synthetase, preferably of EC 6.2.1.3, which catalyses the synthesis of an acyl-coenzyme A thioester,
E_{b} acyl-CoA dehydrogenase, preferably of EC 1.3.99.-, EC 1.3.99.3 or EC 1.3.99.13, which catalyses the oxidation of an acyl-coenzyme A thioester to give the corresponding enoyl-coenzyme A thioester,
E_{c} acyl-CoA oxidase, preferably of EC 1.3.3.6, which catalyses the oxidation of an acyl-coenzyme A thioester to give the corresponding enoyl-coenzyme A thioester,
E_{d} enoyl-CoA hydratase, preferably of EC 4.2.1.17 or EC 4.2.1.74, which catalyses the hydratization of an enoyl-coenzyme A thioester to give the corresponding 3-hydroxyacyl-coenzyme A thioester,
Eₑ 3-hydroxyacyl-CoA dehydrogenase, preferably of EC 1.1.1.35 or EC 1.1.1.211, which catalyses the oxidation of a 3-hydroxyacyl-coenzyme A thioester to give the corresponding 3-oxoacyl-coenzyme A thioester, and
E_{f} acetyl-CoA acyltransferase, preferably of EC 2.3.1.16, which catalyses the transfer of an acetyl residue from a 3-oxoacyl-coenzyme A thioester to coenzyme A and thus generates an acyl-coenzyme A thioester which is shortened by two carbon atoms,
which is reduced in comparison with the enzymatic activity of the wild type of the microorganism.

[0143] The technical effect of this is that the drain of the carboxylic acids and carboxylic acid derivatives formed in larger amounts due to the first genetic modification, but also of those formed in larger amounts due to the second, third and fourth genetic modification, is prevented.

[0144] The wording “activity which is reduced in comparison with its wild type” is preferably understood as meaning an activity which is reduced by at least 50%, especially preferably by at least 90%, more preferably by at least 99.9%, even more preferably by at least 99.99% and most preferably by at least 99.999%, based on the wild type activity. The wording “reduced activity” also comprises no detectable activity (“zero activity”). The reduction of the activity of a specific enzyme can be effected for example by the targeted mutation or by other means known to a person skilled in the art for reducing the activity of a specific enzyme. Other methods of reducing enzymatic activities in microorganisms are known to a person skilled in the art.

[0145] Methods of choice here are, in particular, molecular-biological techniques. Information on the modification and reduction of protein expressions and reduced enzymatic activity which these entail specifically for Candida, in particular for interrupting specific genes, can be found by the skilled worker in WO91/006660 and WO03/100013.

[0146] Microorganisms which are preferred according to the invention are characterized in that the reduction of the enzymatic activity is achieved by modifying a gene comprising a nucleic acid sequence encoding the abovementioned enzymes, the modification being selected from the group comprising, preferably composed of, insertion of foreign DNA into the gene, deletion of at least parts of the gene, point mutations in the gene sequence, RNA interference (siRNA), antisense RNA or modification (insertion, deletion or point mutations) of regulatory sequences which flank the gene. In this context, foreign DNA is understood as meaning any DNA sequence which is “foreign” to the gene (but not the organism). In this context it is especially preferred that the gene is interrupted by inserting a selection marker gene, the foreign DNA thus being a selection marker gene, where the insertion has preferably been effected by homologous recombination into the gene locus. In this context, it may be advantageous to extend the selection marker gene by further functionalities which, in turn, make possible a subsequent removal from the gene. This may be achieved for example by recombination systems which are foreign to the organism, such as a Cre/loxP system or FRT (Flippase Recognition Target) system or by the homologous recombination system which belongs to the organism. The reduction of the activity of the microorganism according to the invention in comparison with its wild type is determined by abovementioned methods for determining the activity using cell numbers/concentrations which are as equal as possible, the cells having been grown under identical conditions such as, for example, medium, gas supply, agitation.

### Specific Enzymes Eₐ

[0147] In cells which are preferred according to the invention, the enzyme Eₐ is one which comprises the sequence NP_{—}416319.1 (SEQ ID No.: 18)

proteins with a polypeptide sequence in which up to 60%, preferably up to 25%, especially preferably up to 15%, in particular up to 10, 9, 8, 7, 6, 5, 4, 3, 2, 1% of the amino acid residues are modified in comparison with the abovementioned reference sequences by deletion, insertion, substitution, or a combination thereof and which still have at least 50%, preferably 65%, especially preferably 80%, in particular more than 90%, of the activity of the protein with the corresponding abovementioned reference sequence, where 100% activity of the reference protein is understood as meaning the increase of the activity of the cells used as biocatalyst, that is to say the amount of substance reacted per unit time, based on the cell weight used (units per gram of cell dry weight [U/g CDW]), compared with the activity of the biocatalyst without the presence of the reference protein, where activity in this context and in the context of the determination of the activity of the enzyme Eₐ is generally understood in particular as meaning the synthesis of dodecanoyl-CoA thioester.

### Specific Enzymes E_{b}

[0148] Furthermore, it is preferred according to the invention that the enzyme E_{b} in the cells according to the invention is one which comprises sequences selected from among:

YP_{—}488518.1 (encoded by SEQ ID No. 14, formerly AP_{—}000876.1), ZP_{—}08341828.1, YP_{—}002291517.1, ZP_{—}08393771.1, EFW53921.1, YP_{—}003227327.1, YP_{—}001461409.1, AEG35025.1, YP_{—}002385739.1, EGJ00024.1, ZP_{—}08352177.1, ZP_{—}03070250.1, ZP_{—}08367389.1, EGM63466.1, CBI99746.1, ZP_{—}06660773.1, ZP_{—}08372569.1, YP_{—}309282.2, YP_{—}001879017.1, YP_{—}003497883.1, ACI71032.1, YP_{—}002406464.1, EGB79412.1, EFZ76765.1, ZP_{—}07145000.1, ZP_{—}07151031.1, AAZ87047.1, EFZ56676.1, ZP_{—}06656148.1, EGB35012.1, EGB71054.1, EFW49392.1, ZP_{—}07183316.1, YP_{—}002396328.1, YP_{—}002327805.1, ZP_{—}03027602.1, AAG54546.1, YP_{—}001742341.1, ZP_{—}04538240.1, EFX12717.1, ACI71029.1, NP_{—}285938.2, ZP_{—}03064986.1, ZP_{—}07120505.1, YP_{—}539295.2, ZP_{—}03049609.1, ZP_{—}06652178.1, AAP15817.1, NP_{—}706224.3, ABI99723.1, EGB60663.1, EFW71911.1, EGH38574.1, YP_{—}668186.1, EGK29152.1, EGC05203.1, ZP_{—}02801146.2, YP_{—}687886.1, ZP_{—}08346491.1, EGJ94671.1, EGC94003.1, ZP_{—}08362542.1, YP_{—}002381459.1, AAN78852.1, NP_{—}752308.2, ZP_{—}07173894.1, ZP_{—}08357265.1, ZP_{—}08382276.1, ZP_{—}02902298.1, ZP_{—}04560694.1, ZP_{—}06354226.1, CBY94356.1, NP_{—}459307.1, EGE28353.1, ZP_{—}04657138.1, YP_{—}002225434.1, YP_{—}002635948.1, YP_{—}151638.1, ZP_{—}02663643.1, NP_{—}454921.1, YP_{—}004729161.1, YP_{—}215297.1, YP_{—}001454506.1, YP_{—}001571699.1, YP_{—}003363866.1, EGK30199.1, EGJ91900.1, EGK28208.1, ZP_{—}08497358.1, CBK85993.1, YP_{—}003611563.1, YP_{—}004592567.1, YP_{—}003441061.1, YP_{—}002240296.1, YP_{—}002917946.1, ZP_{—}06549304.1, ZP_{—}06017126.1, YP_{—}001333918.1, AAM28523.1, ZP_{—}08305363.1, YP_{—}001439185.1, EGL74026.1, YP_{—}001175495.1, ZP_{—}05968792.1, YP_{—}003209204.1, YP_{—}003943022.1, YP_{—}004499335.1, ZP_{—}06191708.1, YP_{—}001477183.1, ZP_{—}07951567.1, YP_{—}003740265.1, NP_{—}668276.1, ZP_{—}04637564.1, ZP_{—}04631714.1, CBY26031.1, YP_{—}004297237.1, YP_{—}001007400.1, ZP_{—}04625511.1, YP_{—}069424.1, ZP_{—}04616432.1, ZP_{—}04639135.1, YP_{—}001871363.1, ZP_{—}04620883.1, ZP_{—}06636999.1, ZP_{—}07377275.1, YP_{—}003929932.1, YP_{—}001722031.1, ZP_{—}04614013.1, ZP_{—}04628476.1, YP_{—}003713213.1, YP_{—}003530236.1, CBX79727.1, YP_{—}004114694.1, YP_{—}001908526.1, ADP 11689.1, YP_{—}002649711.1, YP_{—}003469212.1, YP_{—}003519171.1, YP_{—}051564.1, ZP_{—}03833764.1, ZP_{—}03827249.1, NP_{—}928504.1, YP_{—}004211704.1, ZP_{—}07681706.1, YP_{—}003018849.1, YP_{—}003260788.1, YP_{—}003042091.1, ZP_{—}05973896.1, ZP_{—}03317495.1, ZP_{—}02958330.2, EFW60358.1, EGI98786.1, ZP_{—}06127315.2, YP_{—}002150121.1, ZP_{—}03842196.1, YP_{—}003884303.1, YP_{—}003003248.1, YP_{—}003334792.1, ZP_{—}03379559.1, CBA73629.1, YP_{—}002986552.1, ZP_{—}06538530.1, ZP_{—}01258771.1, ZP_{—}04921840.1, ZP_{—}06180371.1, ZP_{—}08308836.1, ZP_{—}06174994.1, YP_{—}001446380.1, ZP_{—}01237449.1, ZP_{—}01161468.1, ZP_{—}01222040.1, ZP_{—}06038476.1, ZP_{—}05925639.1, ZP_{—}06154677.1, ZP_{—}02195704.1, ZP_{—}01989646.1, ZP_{—}01868523.1, YP_{—}131060.1, ZP_{—}05722161.1, ZP_{—}05716057.1, NP_{—}798668.1, EGF45205.1, ZP_{—}05120764.1, EGR07881.1, ZP_{—}08100412.1, ZP_{—}04919383.1, ZP_{—}06054287.1, YP_{—}002156761.1, YP_{—}205315.2, ZP_{—}04961417.1, ZP_{—}06050299.1, ZP_{—}08103013.1, ZP_{—}01949008.1, NP_{—}231862.1, AEA79156.1, ZP_{—}06081122.1, ZP_{—}04418155.1, YP_{—}001217747.1, ZP_{—}04413631.1, NP_{—}935312.1, ZP_{—}01977990.1, NP_{—}760770.1, YP_{—}004188005.1, YP_{—}002810906.1, ZP_{—}05884155.1, ZP_{—}05946273.1, ZP_{—}01065180.1, ZP_{—}01815735.1, YP_{—}002417909.1, YP_{—}002263750.1, YP_{—}856109.1, ZP_{—}07744057.1, ZP_{—}08520214.1, ZP_{—}06034047.1, YP_{—}004565576.1, ZP_{—}05881167.1, ZP_{—}00991316.1, YP_{—}734276.1, ADT86286.1, YP_{—}001142550.1, YP_{—}869958.1, ZP_{—}08566610.1, ZP_{—}05876732.1, YP_{—}001366225.1, YP_{—}001094233.1, ADV54653.1, YP_{—}963612.1, YP_{—}738268.1, YP_{—}001502248.1, YP_{—}004391846.1, YP_{—}002311644.1, YP_{—}002358241.1, YP_{—}001050670.1, ZP_{—}07390237.1, YP_{—}001674114.1, YP_{—}001554497.1, NP_{—}718122.1, YP_{—}001760976.1, YP_{—}927745.1, YP_{—}562771.1, YP_{—}003557130.1, ZP_{—}02159449.1, YP_{—}003913548.1, YP_{—}001473736.1, YP_{—}750554.1, ZP_{—}01897495.1, YP_{—}268985.1, ZP_{—}01042474.1, ZP_{—}08570996.1, YP_{—}004427315.1, ZP_{—}07010199.1, YP_{—}156047.1, ZP_{—}07097521.1, YP_{—}004467113.1, ZP_{—}01614110.1, YP_{—}340459.1, YP_{—}004434754.1, YP_{—}662062.1, YP_{—}004068195.1, ZP_{—}08409704.1, ZP_{—}08622396.1, ZP_{—}01135962.1, ZP_{—}03560927.1, ZP_{—}04716612.1, EGB41427.1, EGP48304.1, EFV84045.1, ZP_{—}08505249.1, ZP_{—}06688896.1, YP_{—}003980530.1, YP_{—}003168652.1, YP_{—}003146346.1, YP_{—}001250478.1, YP_{—}095752.1, YP_{—}124009.1, CBW99992.1, YP_{—}284763.1, YP_{—}127029.1, YP_{—}746940.1, ZP_{—}07663653.1, ZP_{—}03349444.1, YP_{—}002354470.1, YP_{—}004145615.1, YP_{—}003524477.1, ZP_{—}03698069.1, YP_{—}003376672.1, ZP_{—}06188282.1, EFW81359.1, EGH83675.1, EGH67821.1, EFW83732.1, YP_{—}273865.1, NP_{—}902393.1, ZP_{—}06457469.1, EGH99235.1, ZP_{—}03397893.1, ZP_{—}07004262.1, ZP_{—}06732661.1, ZP_{—}07263971.1, EGH75297.1, NP_{—}888341.1, EGH31566.1, EGH45251.1, NP_{—}643363.1, EGH24154.1, EGH92666.1, EGH73945.1, EGH12424.1, NP_{—}793629.1, ZP_{—}06705890.1, YP_{—}234714.1, EGH62932.1, EGH52925.1, ZP_{—}01126966.1, NP_{—}841588.1, ZP_{—}05109483.1, YP_{—}003847638.1, YP_{—}004294524.1, ZP_{—}02244088.1, NP_{—}884586.1, ZP_{—}08176463.1, ZP_{—}04588788.1, YP_{—}450732.1, ZP_{—}08185386.1, YP_{—}001914265.1, YP_{—}003527565.1, YP_{—}004696148.1, NP_{—}638218.1, ZP_{—}05046817.1, YP_{—}343737.1, ZP_{—}07652844.1, YP_{—}004227922.1, YP_{—}364921.1, YP_{—}001632020.1, NP_{—}744048.1, YP_{—}001898007.1, YP_{—}003145987.1, YP_{—}558241.1, YP_{—}410795.1, YP_{—}001895310.1, YP_{—}002980410.1, ZP_{—}06841648.1, YP_{—}258889.1, YP_{—}931967.1, YP_{—}003760619.1, YP_{—}002029446.1, YP_{—}004474743.1, YP_{—}158312.1, YP_{—}004380764.1, YP_{—}001973352.1, CBJ39115.1, YP_{—}349912.1, YP_{—}003753442.1, ZP_{—}05135288.1, YP_{—}004700980.1, YP_{—}927690.1, YP_{—}001269130.1, YP_{—}742956.1, ADR61321.1, YP_{—}001347709.1, YP_{—}004355482.1, YP_{—}003907207.1, NP_{—}251505.1, ZP_{—}04929120.1, NP_{—}518658.1, YP_{—}002871500.1, ZP_{—}01451059.1, EGM21899.1, YP_{—}001187411.1, ZP_{—}08570514.1, ZP_{—}07794119.1, YP_{—}004391835.1, YP_{—}002256385.1, ZP_{—}07774414.1, YP_{—}855885.1, YP_{—}563120.1, YP_{—}001172167.1, YP_{—}004713921.1, ZP_{—}08138366.1, AEA83572.1, YP_{—}003746704.1, ZP_{—}08521441.1, ZP_{—}05061205.1, YP_{—}001667709.1, YP_{—}750573.1, YP_{—}607261.1, ZP_{—}05118288.1, YP_{—}002311716.1, NP_{—}718079.1, YP_{—}003777020.1, ZP_{—}06052248.1, ZP_{—}00943163.1, ZP_{—}08309312.1, AEG70141.1, YP_{—}001748377.1, YP_{—}001857928.1, YP_{—}001094176.1, YP_{—}003604813.1, ZP_{—}01947893.1,
in particular
EFW81359.1, EGH83675.1, EGH67821.1, EFW83732.1, YP_{—}273865.1, ZP_{—}06457469.1, EGH99235.1, ZP_{—}03397893.1, ZP_{—}07004262.1, ZP_{—}07263971.1, EGH75297.1, EGH31566.1, EGH45251.1, EGH24154.1, EGH92666.1, EGH73945.1, EGH12424.1, NP_{—}793629.1, YP_{—}234714.1, EGH62932.1, EGH52925.1, ZP_{—}04588788.1, NP_{—}744048.1, YP_{—}258889.1, YP_{—}004474743.1, YP_{—}004380764.1, YP_{—}349912.1, YP_{—}004700980.1, YP_{—}001269130.1, ADR61321.1, YP_{—}001347709.1, YP_{—}004355482.1, NP_{—}251505.1, ZP_{—}04929120.1, YP_{—}002871500.1, EGM21899.1, YP_{—}001187411.1, ZP_{—}07794119.1, ZP_{—}07774414.1, YP_{—}001172167.1, YP_{—}004713921.1, ZP_{—}08138366.1, AEA83572.1, YP_{—}001667709.1, YP_{—}607261.1, YP_{—}001748377.1, YP_{—}260045.1, YP_{—}002873091.1, ZP_{—}07775826.1, CAC34855.1, EGH11916.1, ZP_{—}05641615.1, ZP_{—}06480669.1, ZP_{—}06480668.1, ZP_{—}05641616.1, ZP_{—}06492823.1, ZP_{—}06492821.1, EGH11920.1, EGH25319.1, ZP_{—}06492824.1, ADX52254.1, YP_{—}488518.1 (encoded by SEQ ID No. 14, formerly AP_{—}000876.1), ZP_{—}08341828.1, YP_{—}002291517.1, YP_{—}003227327.1, YP_{—}001461409.1, AEG35025.1, YP_{—}002385739.1, ZP_{—}08352177.1, ZP_{—}03070250.1, ZP_{—}08367389.1, CBI99746.1, ZP_{—}06660773.1, ZP_{—}08372569.1, YP_{—}003497883.1, ACI71032.1, YP_{—}002406464.1, EGB79412.1, EFZ76765.1, ZP_{—}07145000.1, ZP_{—}07151031.1, EFZ56676.1, ZP_{—}06656148.1, EGB35012.1, EGB71054.1, ZP_{—}07183316.1, YP_{—}002396328.1, YP_{—}002327805.1, ZP_{—}03027602.1, AAG54546.1, YP_{—}001742341.1, ABE05764.1, EFX12717.1, ACI71029.1, NP_{—}285938.2, ZP_{—}07120505.1, YP_{—}539295.2, ZP_{—}03049609.1, ZP_{—}06652178.1, ABI99723.1, EGB60663.1, EFW71911.1, EGH38574.1, YP_{—}668186.1, ZP_{—}02801146.2, ZP_{—}08346491.1, ZP_{—}08362542.1, AAN78852.1, NP_{—}752308.2, ZP_{—}07173894.1, ZP_{—}08357265.1, ZP_{—}08382276.1, AAM28523.1, ZP_{—}07097521.1, EGB41427.1, EGB41426.1, BAA07583.1, ZP_{—}07100038.1, CAX20347.1
and especially preferably
NP_{—}744048.1, YP_{—}004700980.1, YP_{—}001269130.1, ADR61321.1, YP_{—}001667709.1, YP_{—}001748377.1, YP_{—}258889.1, YP_{—}349912.1, YP_{—}002871500.1, ZP_{—}07774414.1, YP_{—}260045.1, YP_{—}002873091.1, ZP_{—}07775826.1, CAC34855.1, YP_{—}001172167.1, YP_{—}004713921.1, AEA83572.1, YP_{—}488518.1 (encoded by SEQ ID No. 14, formerly AP_{—}000876.1), BAA07583.1, ZP_{—}07594808.1,
and
proteins with a polypeptide sequence in which up to 60%, preferably up to 25%, especially preferably up to 15%, in particular up to 10, 9, 8, 7, 6, 5, 4, 3, 2, 1% of the amino acid residues are modified in comparison with the abovementioned reference sequences by deletion, insertion, substitution, or a combination thereof and which still have at least 50%, preferably 65%, especially preferably 80%, in particular more than 90%, of the activity of the protein with the corresponding abovementioned reference sequence, where 100% activity of the reference protein is understood as meaning the increase of the activity of the cells used as biocatalyst, that is to say the amount of substance reacted per unit time, based on the cell weight used (units per gram of cell dry weight [U/g CDW]), compared with the activity of the biocatalyst without the presence of the reference protein, where activity in this context and in the context of the determination of the activity of the enzyme E_{b} is generally understood in particular as meaning the oxidation of dodecanoyl-CoA thioester to give 2-dodecenoyl-CoA thioester.

### Specific Enzymes E_{c}

[0149] Furthermore, it is preferred according to the invention that the enzyme E_{c} in the cells according to the invention is one which comprises sequences selected from among:

YP_{—}003571780.1, YP_{—}445820.1, YP_{—}634556.1, YP_{—}004665862.1, ZP_{—}01461690.1, YP_{—}921666.1, YP_{—}002778910.1, ZP_{—}08550394.1, YP_{—}003384289.1, YP_{—}001195727.1, YP_{—}702012.1, ZP_{—}04384437.1, YP_{—}002765110.1, ZP_{—}04996322.1, ZP_{—}08195144.1, ZP_{—}04700546.1, YP_{—}954595.1, YP_{—}004736804.1, ADW07059.1, YP_{—}001827916.1, ZP_{—}04691466.1, YP_{—}001109453.1, ZP_{—}08240125.1, YP_{—}003272226.1, YP_{—}004053469.1, ZP_{—}06272176.1, YP_{—}004491616.1, YP_{—}001133991.1, YP_{—}001071715.1, YP_{—}290295.1, YP_{—}003193744.1, YP_{—}001704317.1, YP_{—}004008413.1, YP_{—}004655806.1, YP_{—}640598.1, ZP_{—}08153802.1, ZP_{—}00995173.1, ZP_{—}05225674.1, YP_{—}888747.1, YP_{—}003114111.1, YP_{—}004522832.1, ZP_{—}06848773.1, ZP_{—}08203814.1, YP_{—}001851901.1, EGO40578.1, YP_{—}003134974.1, ZP_{—}07282448.1, YP_{—}003770185.1, YP_{—}881295.1, YP_{—}004336131.1, NP_{—}961035.1, YP_{—}004164861.1, YP_{—}003681133.1, ZP_{—}04749633.1, ZP_{—}07718288.1, ZP_{—}01201898.1, YP_{—}004223976.1, YP_{—}118690.1, YP_{—}905275.1, BAE47462.1, YP_{—}831622.1, YP_{—}003407476.1, ZP_{—}01129477.1, YP_{—}003645654.1, YP_{—}004454693.1, YP_{—}002487953.1, YP_{—}004084231.1, YP_{—}003836912.1, YP_{—}004241154.1, ZP_{—}07706098.1, YP_{—}001855531.1, ZP_{—}08124588.1, YP_{—}947882.1, BAE47461.1, YP_{—}003327670.1, YP_{—}001363757.1, YP_{—}004601796.1, YP_{—}001625220.1, YP_{—}003638017.1, ZP_{—}06501585.1, YP_{—}004404736.1, YP_{—}062974.1, YP_{—}002957230.1, YP_{—}003316209.1, YP_{—}003149881.1, YP_{—}001221553.1, YP_{—}003162313.1, ZP_{—}03978917.1, YP_{—}001708860.1, ZP_{—}05912043.1, ZP_{—}06806059.1, YP_{—}003155732.1, YP_{—}002835700.1, YP_{—}003916799.1, ZP_{—}03936415.1, ZP_{—}07090640.1, ZP_{—}08516453.1, AAB97825.1, YP_{—}004541029.1, YP_{—}004606508.1, YP_{—}001801238.1, ZP_{—}07989876.1, YP_{—}004761186.1, YP_{—}002883572.1, ZP_{—}08023616.1, ZP_{—}05847263.1, YP_{—}251740.1, ZP_{—}03394212.1, YP_{—}001107648.1, YP_{—}002872770.1, YP_{—}001821654.1, ZP_{—}08233739.1, AAD12170.1, ZP_{—}08215859.1, AAD40800.1, ZP_{—}05005905.1, ADW07311.1, YP_{—}348592.1, NP_{—}824883.1, NP_{—}627459.1, YP_{—}001828149.1, ZP_{—}05525554.1, ZP_{—}08240364.1, ZP_{—}07299658.1, ZP_{—}06582153.1, ZP_{—}06921827.1, ZP_{—}04703961.1, BAJ27090.1, ZP_{—}06592678.1, ZP_{—}04691265.1, YP_{—}001751500.1, BAJ31579.1, preferably YP_{—}003571780.1, YP_{—}445820.1, YP_{—}634556.1, YP_{—}004665862.1, ZP_{—}01461690.1, YP_{—}921666.1, YP_{—}002778910.1, ZP_{—}08550394.1, YP_{—}003384289.1, YP_{—}001195727.1, YP_{—}702012.1, ZP_{—}04384437.1, YP_{—}002765110.1, ZP_{—}04996322.1, ZP_{—}08195144.1, ZP_{—}04700546.1, YP_{—}954595.1, YP_{—}004736804.1, ADW07059.1, YP_{—}001827916.1, ZP_{—}04691466.1, YP_{—}001109453.1, ZP_{—}08240125.1, YP_{—}003272226.1, YP_{—}004053469.1, ZP_{—}06272176.1, YP_{—}004491616.1, YP_{—}001133991.1, YP_{—}001071715.1, YP_{—}290295.1, YP_{—}003193744.1, YP_{—}001704317.1, YP_{—}004008413.1, YP_{—}004655806.1, YP_{—}640598.1, ZP_{—}08153802.1, ZP_{—}00995173.1, ZP_{—}05225674.1, YP_{—}888747.1, YP_{—}003114111.1, YP_{—}004522832.1, ZP_{—}06848773.1, ZP_{—}08203814.1, YP_{—}001851901.1, EGO40578.1, YP_{—}003134974.1, ZP_{—}07282448.1, YP_{—}003770185.1, YP_{—}881295.1, YP_{—}004336131.1, NP_{—}961035.1, YP_{—}004164861.1, YP_{—}003681133.1, ZP_{—}04749633.1, ZP_{—}07718288.1, ZP_{—}01201898.1, YP_{—}004223976.1, YP_{—}118690.1, YP_{—}905275.1, BAE47462.1, YP_{—}831622.1, YP_{—}003407476.1, ZP_{—}01129477.1, YP_{—}003645654.1, YP_{—}004454693.1, YP_{—}002487953.1, YP_{—}004084231.1, YP_{—}003836912.1, YP_{—}004241154.1, ZP_{—}07706098.1, YP_{—}001855531.1, ZP_{—}08124588.1, YP_{—}947882.1, BAE47461.1, YP_{—}003327670.1, YP_{—}001363757.1, YP_{—}004601796.1, YP_{—}001625220.1, YP_{—}003638017.1, ZP_{—}06501585.1, YP_{—}004404736.1, YP_{—}062974.1, YP_{—}002957230.1, YP_{—}003316209.1, YP_{—}003149881.1, YP_{—}001221553.1, YP_{—}003162313.1, ZP_{—}03978917.1, YP_{—}001708860.1, ZP_{—}05912043.1, ZP_{—}06806059.1, YP_{—}003155732.1, YP_{—}002835700.1, YP_{—}003916799.1, ZP_{—}03936415.1, ZP_{—}07090640.1, ZP_{—}08516453.1, AAB97825.1, YP_{—}004541029.1, YP_{—}004606508.1, YP_{—}001801238.1, ZP_{—}07989876.1, YP_{—}004761186.1, YP_{—}002883572.1, ZP_{—}08023616.1, ZP_{—}05847263.1, YP_{—}251740.1,
and especially preferably YP_{—}002835700.1, ZP_{—}03936415.1, BAE47461.1, YP_{—}001801238.1, ZP_{—}03978917.1, ZP_{—}03394212.1, ZP_{—}05847263.1, ZP_{—}08516453.1, YP_{—}004606508.1, YP_{—}251740.1, ZP_{—}07090640.1, ZP_{—}07989876.1, YP_{—}004761186.1,
proteins with a polypeptide sequence in which up to 60%, preferably up to 25%, especially preferably up to 15%, in particular up to 10, 9, 8, 7, 6, 5, 4, 3, 2, 1% of the amino acid residues are modified in comparison with the abovementioned reference sequences by deletion, insertion, substitution, or a combination thereof and which still have at least 50%, preferably 65%, especially preferably 80%, in particular more than 90%, of the activity of the protein with the corresponding abovementioned reference sequence, where 100% activity of the reference protein is understood as meaning the increase of the activity of the cells used as biocatalyst, that is to say the amount of substance reacted per unit time, based on the cell weight used (units per gram of cell dry weight [U/g CDW]), compared with the activity of the biocatalyst without the presence of the reference protein, where activity in this context and in the context of the determination of the activity of the enzyme E_{c} is generally understood in particular as meaning oxidation of dodecanoyl-CoA thioester to give 2-dodecenoyl-CoA thioester.

### Specific Enzymes E_{d} and Eₑ

[0150] Furthermore, it is preferred according to the invention that the enzyme E_{d} or Eₑ in the cells according to the invention is one which comprises sequences selected from among:

ZP_{—}07164313.1, NP_{—}418288.1, YP_{—}003231641.1, EGM59778.1, EFZ53307.1, AAA23750.1, ZP_{—}07192215.1, YP_{—}001460638.1, YP_{—}001727088.1, EGK16564.1, ZP_{—}08380619.1, ZP_{—}07136310.1, CAB40809.1, NP_{—}839030.1, ZP_{—}07690617.1, EGC97039.1, ZP_{—}07103516.1, ZP_{—}03027888.1, ZP_{—}07121980.1, YP_{—}002414996.1, EGP22873.1, EGJ82677.1, EGB59499.1, ZP_{—}07118761.1, YP_{—}002409078.1, YP_{—}002295407.1, EGE62412.1, EGB69560.1, ZP_{—}06655948.1, ZP_{—}06664574.1, ZP_{—}03070699.1, ZP_{—}07145404.1, ZP_{—}08376058.1, EGB85466.1, ZP_{—}07189176.1, ZP_{—}02999920.1, ZP_{—}08356523.1, ZP_{—}06659936.1, ZP_{—}07139396.1, YP_{—}001746178.1, YP_{—}002384700.1, ZP_{—}07098889.1, CBG37051.1, ZP_{—}04873109.1, CBJ03626.1, ZP_{—}08366395.1, ZP_{—}03066301.1, BAI57243.1, YP_{—}001465330.1, YP_{—}405325.1, NP_{—}312801.1, EGI89589.1, EGC09628.1, EFW73050.1, ZP_{—}07221474.1, EGB39932.1, EFW72281.1, ZP_{—}07154547.1, YP_{—}002331616.1, EGB76756.1, EFZ75005.1, ZP_{—}07449248.1, NP_{—}756652.2, ZP_{—}04006347.1, NP_{—}290476.1, EGH36687.1, YP_{—}671920.1, ZP_{—}08350773.1, EGC05062.1, ZP_{—}07174622.1, CAP78309.1, ZP_{—}08361145.1, YP_{—}002400350.1, ZP_{—}08386169.1, EFU60028.1, ZP_{—}02904283.1, YP_{—}859447.1, YP_{—}543379.2, NP_{—}462868.1, ZP_{—}02663494.1, ACY91152.1, ZP_{—}03221347.1, YP_{—}001591071.1, YP_{—}002639596.1, EFY10009.1, ZP_{—}04656823.1, ZP_{—}03213459.1, ZP_{—}02701437.1, ZP_{—}02347126.1, YP_{—}002217909.1, ZP_{—}02658976.1, YP_{—}002245833.1, YP_{—}002228260.1, YP_{—}001451793.1, EGE35935.1, YP_{—}002047992.1, ZP_{—}02834645.1, ZP_{—}02669606.1, YP_{—}001572623.1, ZP_{—}03075319.1, YP_{—}002148908.1, YP_{—}004591813.1, ZP_{—}03163685.1, YP_{—}002043211.1, NP_{—}457769.1, YP_{—}003367347.1, YP_{—}004732313.1, ZP_{—}06546517.1, ZP_{—}08495782.1, ZP_{—}04558441.1, YP_{—}002241091.1, ZP_{—}06354348.2, ZP_{—}06552493.1, YP_{—}001337975.1, YP_{—}001178655.1, CBK87780.1, ZP_{—}05970964.1, ZP_{—}06014071.1, YP_{—}002917176.1, YP_{—}152910.1, Q9F0Y7.1, ZP_{—}08302760.1, YP_{—}003615422.1, YP_{—}003943709.1, EGI93642.1, YP_{—}001439747.1, YP_{—}003208640.1, YP_{—}001476499.1, ZP_{—}06638309.1, YP_{—}004498688.1, YP_{—}004296470.1, ZP_{—}06192594.1, YP_{—}001004653.1, ZP_{—}04634366.1, CBY29055.1, ZP_{—}04641538.1, ZP_{—}04628383.1, ZP_{—}04620754.1, ZP_{—}04624649.1, YP_{—}003739635.1, ZP_{—}07953302.1, YP_{—}001399280.1, NP_{—}667802.1, YP_{—}068813.1, ADV97208.1, ZP_{—}04637125.1, YP_{—}003019595.1, YP_{—}048335.1, ZP_{—}04612255.1, ZP_{—}03831342.1, ZP_{—}03827989.1, YP_{—}003261565.1, ZP_{—}04616540.1, EFW54755.1, YP_{—}004214864.1, BAK13441.1, YP_{—}003518496.1, YP_{—}003933023.1, ZP_{—}07380063.1, YP_{—}003042702.1, YP_{—}003713991.1, YP_{—}003466462.1, YP_{—}004114076.1, YP_{—}001906200.1, NP_{—}931575.1, EGK17810.1, CBX79037.1, YP_{—}003529581.1, ZP_{—}06937250.1, YP_{—}002647270.1, ADP11112.1, ZP_{—}05974166.1, ZP_{—}03318464.1, ZP_{—}02958886.1, YP_{—}003331802.1, ZP_{—}06125606.1, YP_{—}003006180.1, YP_{—}003885045.1, YP_{—}128321.1, ZP_{—}01236908.1, ZP_{—}01161145.1, YP_{—}002989323.1, YP_{—}002154796.1, YP_{—}203408.1, ZP_{—}08310903.1, YP_{—}002264299.1, ZP_{—}01221704.1, ZP_{—}06050960.1, ZP_{—}03841335.1, ZP_{—}05883431.1, YP_{—}002153226.1, ADT85583.1, ZP_{—}05879947.1, ZP_{—}04923724.1, ZP_{—}01262258.1, ZP_{—}06179383.1, ZP_{—}05883853.1, EGF42158.1, ZP_{—}01957954.1, ZP_{—}08101926.1, ZP_{—}06177050.1, NP_{—}759944.1, NP_{—}796409.1, ZP_{—}04419618.1, ZP_{—}01987794.1, ZP_{—}05121182.1, YP_{—}001443702.1, ZP_{—}01948571.1, ZP_{—}01682057.1, ZP_{—}04405432.1, NP_{—}232384.1, ZP_{—}04409574.1, ZP_{—}01870127.1, NP_{—}932822.1, ZP_{—}06943917.1, EGR05147.1, ZP_{—}04961951.1, EGR10674.1, ZP_{—}04414292.1, ZP_{—}05718020.1, ZP_{—}08098153.1, ZP_{—}05719938.1, ZP_{—}03356468.1, ZP_{—}07742015.1, YP_{—}004564872.1, ZP_{—}01979859.1, ZP_{—}00992843.1, ZP_{—}05927571.1, ZP_{—}01065523.1, YP_{—}002415749.1, ZP_{—}01815881.1, ZP_{—}02196043.1, YP_{—}001143922.1, ZP_{—}08518445.1, ZP_{—}06156529.1, YP_{—}004394586.1, ZP_{—}01900693.1, YP_{—}854676.1, ZP_{—}05943242.1, CBA71812.1, ZP_{—}01991723.1, YP_{—}001092151.1, YP_{—}001672251.1, YP_{—}961420.1, YP_{—}003554801.1, YP_{—}003911300.1, ADV52504.1, YP_{—}001364252.1, YP_{—}001552462.1, ZP_{—}07394327.1, YP_{—}001048426.1, YP_{—}002355987.1, ZP_{—}02158912.1, ABE53312.1, YP_{—}561035.2, YP_{—}748714.1, ZP_{—}01135242.1, NP_{—}715663.1, YP_{—}732157.1, YP_{—}867675.1, YP_{—}736079.1, YP_{—}001758417.1, YP_{—}001499882.1, YP_{—}004436299.1, YP_{—}659787.1, ZP_{—}08620874.1, YP_{—}002309470.1, CBW44433.1, ZP_{—}08568624.1, YP_{—}958423.1, YP_{—}925914.1, YP_{—}001471764.1, ZP_{—}01165107.1, ZP_{—}04717156.1, ZP_{—}01042072.1, ZP_{—}08568929.1, YP_{—}004468425.1, ZP_{—}01614054.1, EGH60623.1, NP_{—}744285.1, ZP_{—}04587907.1, EGH84450.1, YP_{—}609235.1, Q93Q12.1, ZP_{—}07263341.1, YP_{—}004425808.1, EGH10831.1, ZP_{—}08142928.1, YP_{—}435877.1, YP_{—}004701152.1, ADR61111.1, EGH72107.1, ZP_{—}07255969.1, EGH76237.1, YP_{—}154404.1, EGH66371.1, ZP_{—}07005687.1, YP_{—}001268914.1, ZP_{—}03397164.1, YP_{—}267151.1, EGH45982.1, NP_{—}793297.1, YP_{—}236360.1, YP_{—}001667915.1, EGH29726.1, ZP_{—}03561781.1, YP_{—}275370.1, ABP88736.1, ZP_{—}06458302.1, YP_{—}001748526.1, YP_{—}002871195.1, ZP_{—}06478839.1, EGH95845.1, YP_{—}004067126.1, EGH21541.1, ZP_{—}05638744.1, Q9AHY3.2, YP_{—}338568.1, ZP_{—}06078672.1, YP_{—}004352961.1, ZP_{—}01892768.1, ZP_{—}06040413.1, YP_{—}349607.1, YP_{—}259059.1, ZP_{—}08409548.1, ADP97276.1, YP_{—}004713990.1, YP_{—}003626258.1, P28793.1, YP_{—}001172246.1, YP_{—}003810247.1, YP_{—}004313957.1, EGE21928.1, EGE19309.1, EGE13641.1, ZP_{—}08462037.1, EGE13529.1, ZP_{—}06034789.1, EGE12165.1, AEA83639.1, YP_{—}002798635.1, ZP_{—}01306165.1, YP_{—}004474976.1, ZP_{—}01739261.1, NP_{—}251704.1, ACP17923.1, YP_{—}004379416.1, YP_{—}001280990.1, YP_{—}003145204.1, YP_{—}001347517.1, ZP_{—}06877966.1, YP_{—}001187076.1, ZP_{—}08638729.1, YP_{—}001340441.1, ZP_{—}05128804.1, YP_{—}003896827.1, YP_{—}003073151.1, ZP_{—}05096745.1, ZP_{—}01103278.1, YP_{—}693372.1, ZP_{—}01366482.1, ZP_{—}05619303.1, ZP_{—}08328596.1, ZP_{—}05042935.1, YP_{—}574439.1, ZP_{—}01074264.1, YP_{—}004482149.1, YP_{—}045111.1, YP_{—}265216.1, ZP_{—}05362445.1, YP_{—}001715228.1, YP_{—}001844981.1, YP_{—}001708314.1, YP_{—}581488.1, ADY83798.1, ZP_{—}06692406.1, YP_{—}003733838.1, ZP_{—}05824704.1, ZP_{—}06058514.1, ZP_{—}08554004.1, ZP_{—}06068411.1, ZP_{—}06067277.1, ZP_{—}06726497.1, ADX01983.1, ZP_{—}03822268.1, ZP_{—}03347927.1, ZP_{—}01116792.1, YP_{—}527079.1, ZP_{—}06063435.1, ZP_{—}06534677.1, ZP_{—}01219812.1, ZP_{—}03347768.1, YP_{—}002798829.1, ZP_{—}07774142.1, YP_{—}003557881.1, ZP_{—}06157092.1, ZP_{—}01223872.1, ZP_{—}05946076.1, ZP_{—}06499586.1, YP_{—}003451185.1, YP_{—}002361722.1, YP_{—}003266103.1, YP_{—}285556.2, AAZ47086.1, NP_{—}968701.1, ZP_{—}06936670.1, ZP_{—}03805048.1, YP_{—}943922.1, ZP_{—}01217009.1, ADT87675.1, ZP_{—}05877956.1, ZP_{—}03355309.1, ZP_{—}05885304.1, EGK17811.1, ZP_{—}05944972.1, ZP_{—}05119053.1, ZP_{—}06039619.1, ZP_{—}05716842.1, ZP_{—}05721090.1, ZP_{—}06079171.1, ZP_{—}06033023.1, ZP_{—}08098475.1, ZP_{—}08104504.1, ZP_{—}06048048.1, ZP_{—}01677170.1, ZP_{—}01681193.1, NP_{—}230692.2, ZP_{—}05926205.1, ZP_{—}05881372.1, ZP_{—}01975051.1, ZP_{—}04412573.1, ZP_{—}01977591.1, ZP_{—}04415061.1, ZP_{—}06048243.1, YP_{—}742943.1, ZP_{—}04962518.1, ZP_{—}01955504.1, ZP_{—}07741831.1, EGK33112.1, ZP_{—}01980800.1, CBW26643.1, EGQ99075.1, ZP_{—}03561616.1, ZP_{—}06155835.1, ZP_{—}01613403.1, YP_{—}003147156.1, ZP_{—}01866421.1, ZP_{—}08569601.1, YP_{—}004068133.1, ZP_{—}01992793.1, YP_{—}003760621.1, NP_{—}760849.1, NP_{—}935233.1, YP_{—}661240.1, CBA76402.1, YP_{—}003527567.1, ZP_{—}05071916.1, YP_{—}155382.1, ZP_{—}08567109.1, ZP_{—}08410490.1, YP_{—}002357526.1, YP_{—}001473368.1, ZP_{—}05061211.1, ZP_{—}08309062.1, ZP_{—}00990722.1, ZP_{—}01813160.1, YP_{—}343735.1, YP_{—}001366977.1, ZP_{—}07393465.1, YP_{—}002312436.1, ZP_{—}03805047.1, ZP_{—}04716066.1, ZP_{—}01043968.1, YP_{—}562538.1, ZP_{—}01064421.1, YP_{—}928042.1, YP_{—}002416486.1, YP_{—}962941.1, YP_{—}001051116.1, YP_{—}004467793.1, YP_{—}004434876.1, YP_{—}001183979.1, ZP_{—}01125518.1, YP_{—}001555281.1, ZP_{—}01900341.1, YP_{—}001459147.1, ADV54930.1, ZP_{—}06054161.1, YP_{—}001674882.1, YP_{—}001381324.1, ZP_{—}02158374.1, NP_{—}718651.1, YP_{—}737529.1, YP_{—}869101.1, ZP_{—}01258852.1, ZP_{—}05978956.1, ZP_{—}06179776.1, YP_{—}733543.1, ZP_{—}01989664.1, NP_{—}798587.1, EGF45285.1, ZP_{—}05908370.1, YP_{—}001502453.1, ZP_{—}06639387.1, YP_{—}003557654.1, ZP_{—}04921889.1, YP_{—}001436988.1, YP_{—}003468880.1, YP_{—}001761392.1, YP_{—}003267851.1, YP_{—}004730996.1, EGL72460.1, YP_{—}003742516.1, YP_{—}003258850.1, ZP_{—}01132697.1, ZP_{—}01987078.1, YP_{—}004392689.1, ZP_{—}06191156.1, YP_{—}002381996.1, ZP_{—}06176023.1, EGC06853.1, ZP_{—}07196084.1, NP_{—}754768.1, ZP_{—}02901855.1, ZP_{—}08620438.1, EGE30558.1, YP_{—}003211325.1, ZP_{—}03220131.1, YP_{—}217377.1, YP_{—}003940937.1, YP_{—}004669896.1, YP_{—}633521.1, YP_{—}002041652.1, NP_{—}456929.1, YP_{—}001446296.1, ZP_{—}02699767.1, YP_{—}001586838.1, YP_{—}751355.1, ZP_{—}08384609.1, YP_{—}002216460.1, A8 GH86.2, ZP_{—}02667448.1, YP_{—}004595105.1, YP_{—}002408448.1, YP_{—}001479604.1, YP_{—}149790.1, NP_{—}461330.1, YP_{—}002227302.1, ZP_{—}07187886.1, ZP_{—}08374604.1, ZP_{—}02343362.1, ZP_{—}02683558.1, YP_{—}001141958.1, ZP_{—}02662473.1, ZP_{—}07151809.1, YP_{—}004211957.1, YP_{—}003366276.1, YP_{—}003713364.1, ZP_{—}03035287.1, ZP_{—}08364768.1, YP_{—}002413389.1, ZP_{—}07448710.1, ZP_{—}04656170.1, ZP_{—}02654823.1, ZP_{—}01222785.1, EGB63194.1, ZP_{—}08359459.1, YP_{—}002636921.1, YP_{—}002329984.1, YP_{—}001744544.1, CAP76837.1, EFZ73229.1, EFU57443.1, YP_{—}002398712.1, YP_{—}003018387.1, ZP_{—}08520753.1, YP_{—}541623.1, ZP_{—}02574174.1, ZP_{—}07144040.1, ZP_{—}08349090.1, CBG35413.1, ZP_{—}04562847.1, ZP_{—}02195785.1, ZP_{—}02773221.1, EGB40918.1, ZP_{—}03050715.1, ZP_{—}07787570.1, ZP_{—}03831301.1, YP_{—}003003682.1, ZP_{—}08354786.1, YP_{—}051168.1, YP_{—}002403607.1, AEE57458.1, YP_{—}856678.1, YP_{—}001177597.1, ZP_{—}06658276.1, NP_{—}288914.1, YP_{—}002392166.1, ZP_{—}06654274.1, ZP_{—}07102361.1, EGB72544.1, YP_{—}004501987.1, ZP_{—}03027319.1, YP_{—}670274.1, YP_{—}003913906.1, ZP_{—}07097669.1, YP_{—}001463687.1, BAI55757.1, ZP_{—}08553509.1, YP_{—}003500399.1, ZP_{—}07121648.1, ZP_{—}01235780.1, CBK87125.1, YP_{—}002293925.1, ZP_{—}05431367.1, YP_{—}129175.1, ZP_{—}03003629.1, YP_{—}002387809.1, ZP_{—}03043524.1, YP_{—}001569579.1, ZP_{—}05435840.1, ZP_{—}01464666.1, YP_{—}001724305.1, ZP_{—}03068335.1, CBJ01980.1, AEJ57562.1, NP_{—}416843.1, YP_{—}002920590.1, ZP_{—}03828462.1, EGM60943.1, ZP_{—}06351976.1, ZP_{—}05968584.1, EGK21055.1, YP_{—}003040254.1, NP_{—}708223.1, YP_{—}689824.1, ZP_{—}04625886.1, AEJ99232.1, ZP_{—}07135079.1, YP_{—}339488.1, ZP_{—}07247352.1, ZP_{—}07590743.1, ZP_{—}08303100.1, EFU96242.1, EFZ69715.1, YP_{—}001336370.1, YP_{—}001094550.1, ZP_{—}07679578.1, ZP_{—}06547779.1, EGI93593.1, YP_{—}003438264.1, YP_{—}003614165.1, YP_{—}408769.1, YP_{—}001881164.1, YP_{—}003655512.1, YP_{—}002237269.1, YP_{—}004116642.1, ZP_{—}03065203.1, ZP_{—}07951118.1, CAQ79951.1, AAZ26206.1, BAK12062.1, YP_{—}269853.2, NP_{—}930429.2, YP_{—}404102.1, ZP_{—}04620204.1, ZP_{—}08498986.1, YP_{—}001452041.1, ZP_{—}01159981.1, CAE15574.1, A1JK30.2, ZP_{—}04635573.1, ZP_{—}02904987.1, ZP_{—}02961182.1, YP_{—}001005598.1, ZP_{—}01301762.1, ZP_{—}06016509.1, CBY28037.1, ZP_{—}05060968.1, ZP_{—}04632512.1, YP_{—}002156637.1, YP_{—}002132807.1, Q5E3U1.2, YP_{—}205193.1, ZP_{—}04613435.1, ZP_{—}07380136.1, YP_{—}004299028.1, YP_{—}003334344.1, YP_{—}001610684.1, YP_{—}001720255.1, YP_{—}001400379.1, YP_{—}652007.1, NP_{—}668898.1, ZP_{—}04640314.1, ADV98116.1, ZP_{—}03840558.1, ZP_{—}07047543.1, ZP_{—}03320348.1, YP_{—}001681761.1, ZP_{—}04615169.1, ZP_{—}08182604.1, YP_{—}003520988.1, YP_{—}002151536.1, NP_{—}641653.1, ZP_{—}08188276.1, Q668V1.2, YP_{—}463621.1, ZP_{—}05032523.1, YP_{—}363100.1, YP_{—}002490860.1, YP_{—}071146.1, YP_{—}003527951.1, YP_{—}004615064.1, ZP_{—}06702935.1, YP_{—}003277339.1, ZP_{—}06729873.1, YP_{—}004552309.1, ZP_{—}08178119.1, YP_{—}558747.1, YP_{—}003059322.1, ZP_{—}04628689.1, ZP_{—}05043496.1, YP_{—}755774.1, NP_{—}106254.1, NP_{—}774461.1, YP_{—}004145058.1, NP_{—}636640.1, YP_{—}001411745.1, YP_{—}244043.1, YP_{—}003906899.1, ZP_{—}02151779.1, EFW54754.1, YP_{—}004147062.1, YP_{—}434583.1, ZP_{—}06862658.1, YP_{—}003559491.1, ZP_{—}07474361.1, ZP_{—}07478578.1, ZP_{—}03787298.1, ZP_{—}06840682.1, ZP_{—}05161835.1, ZP_{—}06794105.1, ZP_{—}05181908.1, ZP_{—}05174379.1, YP_{—}003883888.1, NP_{—}541475.1, NP_{—}949054.1, YP_{—}003931777.1, YP_{—}001993209.1, ZP_{—}06124668.1, YP_{—}001594738.1, ZP_{—}06070710.1, ZP_{—}06484372.1, YP_{—}002515449.1, YP_{—}001895558.1, YP_{—}002029364.1, ZP_{—}02891585.1, ZP_{—}04682672.1, YP_{—}003761433.1, YP_{—}004107983.1, YP_{—}223224.1, YP_{—}003812264.1, YP_{—}001622574.1, ZP_{—}05452320.1, YP_{—}002734532.1, YP_{—}001257739.1, YP_{—}001372564.1, ZP_{—}05137372.1, YP_{—}001973266.1, YP_{—}342869.1, NP_{—}699967.1, ZP_{—}05086267.1, ZP_{—}01736760.1, YP_{—}001914218.1, ZP_{—}05157647.1, YP_{—}485365.1, YP_{—}001926123.1, ZP_{—}05116437.1, ZP_{—}03544469.1, ZP_{—}08330383.1, ZP_{—}06491403.1, ZP_{—}01896167.1, ADP99705.1, ZP_{—}02883593.1, YP_{—}004228182.1, YP_{—}570677.1, ZP_{—}01225298.1, YP_{—}200487.1, YP_{—}002988196.1, ZP_{—}08269313.1, NP_{—}767800.1, YP_{—}001094989.1, ZP_{—}06065014.1, YP_{—}002981447.1, YP_{—}001260831.1, YP_{—}003817548.1, YP_{—}532099.1, ZP_{—}07676723.1, YP_{—}001242863.1, ZP_{—}02244047.1, YP_{—}982073.1, YP_{—}001899020.1, NP_{—}519880.1, ZP_{—}02379339.1, NP_{—}946171.1, ZP_{—}01615132.1, YP_{—}456953.1, ZP_{—}02168372.1, ZP_{—}08552434.1, CBJ37969.1, YP_{—}004418392.1, ZP_{—}02362492.1, YP_{—}004107339.1, YP_{—}001203133.1, ZP_{—}01546752.1, YP_{—}002974094.1, ZP_{—}02186892.1, YP_{—}001989920.1, YP_{—}002964466.1, ZP_{—}03265887.1, YP_{—}555553.1, CBA26305.1, ZP_{—}06728723.1, ZP_{—}07656835.1, ZP_{—}05620865.1, YP_{—}575713.1, YP_{—}001907090.1, YP_{—}002911224.1, YP_{—}047520.1, YP_{—}004688052.1,
in particular
EGH60623.1, NP_{—}744285.1, ZP_{—}04587907.1, EGH84450.1, YP_{—}609235.1, Q93Q12.1, ZP_{—}07263341.1, EGH10831.1, ZP_{—}08142928.1, YP_{—}004701152.1, ADR61111.1, EGH72107.1, ZP_{—}07255969.1, EGH76237.1, EGH66371.1, ZP_{—}07005687.1, YP_{—}001268914.1, ZP_{—}03397164.1, EGH45982.1, NP_{—}793297.1, YP_{—}236360.1, YP_{—}001667915.1, EGH29726.1, YP_{—}275370.1, ABP88736.1, ZP_{—}06458302.1, YP_{—}001748526.1, YP_{—}002871195.1, ZP_{—}06478839.1, EGH95845.1, EGH21541.1, ZP_{—}05638744.1, Q9AHY3.2, YP_{—}004352961.1, YP_{—}349607.1, YP_{—}259059.1, YP_{—}004713990.1, P28793.1, YP_{—}001172246.1, AEA83639.1, YP_{—}004474976.1, NP_{—}251704.1, ACP17923.1, YP_{—}004379416.1, YP_{—}001347517.1, ZP_{—}06877966.1, YP_{—}001187076.1, ZP_{—}01366482.1, ZP_{—}07774142.1, ZP_{—}06499586.1, YP_{—}791508.1, ZP_{—}07796310.1, NP_{—}250428.1, YP_{—}002441177.1, YP_{—}001348922.1, ZP_{—}06879352.1, AEA82038.1, YP_{—}001170648.1, YP_{—}004473370.1, YP_{—}004712521.1, YP_{—}004353314.1, ZP_{—}07164313.1, NP_{—}418288.1, YP_{—}003231641.1, AAA23750.1, ZP_{—}07192215.1, YP_{—}001460638.1, YP_{—}001727088.1, ZP_{—}08380619.1, ZP_{—}07136310.1, CAB40809.1, ZP_{—}07690617.1, ZP_{—}07103516.1, ZP_{—}03027888.1, ZP_{—}07121980.1, YP_{—}002414996.1, EGP22873.1, EGB59499.1, ZP_{—}07118761.1, YP_{—}002409078.1, YP_{—}002295407.1, EGE62412.1, EGB69560.1, ZP_{—}06655948.1, ZP_{—}06664574.1, ZP_{—}03070699.1, ZP_{—}07145404.1, ZP_{—}08376058.1, EGB85466.1, ZP_{—}07189176.1, ZP_{—}02999920.1, ZP_{—}08356523.1, ZP_{—}06659936.1, ZP_{—}07139396.1, YP_{—}001746178.1, ZP_{—}07098889.1, CBG37051.1, CBJ03626.1, ZP_{—}08366395.1, BAI57243.1, YP_{—}001465330.1, NP_{—}312801.1, EGC09628.1, EFW73050.1, ZP_{—}07221474.1, EGB39932.1, EFW72281.1, ZP_{—}07154547.1, YP_{—}002331616.1, EGB76756.1, EFZ75005.1, ZP_{—}07449248.1, NP_{—}756652.2, ZP_{—}04006347.1, NP_{—}290476.1, EGH36687.1, YP_{—}671920.1, ZP_{—}08350773.1, ZP_{—}07174622.1, CAP78309.1, ZP_{—}08361145.1, YP_{—}002400350.1, ZP_{—}08386169.1, EFU60028.1, YP_{—}859447.1, YP_{—}543379.2, ZP_{—}06937250.1, ZP_{—}06936670.1, YP_{—}001459147.1, ZP_{—}07196084.1, NP_{—}754768.1, ZP_{—}08384609.1, YP_{—}002408448.1, ZP_{—}07187886.1, ZP_{—}08374604.1, ZP_{—}07151809.1, ZP_{—}03035287.1, ZP_{—}08364768.1, YP_{—}002413389.1, ZP_{—}07448710.1, EGB63194.1, ZP_{—}08359459.1, YP_{—}002329984.1, YP_{—}001744544.1, CAP76837.1, EFZ73229.1, EFU57443.1, YP_{—}002398712.1, YP_{—}541623.1, ZP_{—}07144040.1, ZP_{—}08349090.1, CBG35413.1, ZP_{—}02773221.1, EGB40918.1, ZP_{—}03050715.1, ZP_{—}07787570.1, ZP_{—}08354786.1, YP_{—}002403607.1, AEE57458.1, ZP_{—}06658276.1, NP_{—}288914.1, YP_{—}002392166.1, ZP_{—}06654274.1, ZP_{—}07102361.1, EGB72544.1, ZP_{—}03027319.1, YP_{—}670274.1, ZP_{—}07097669.1, YP_{—}001463687.1, BAI55757.1, YP_{—}003500399.1, ZP_{—}07121648.1, YP_{—}002293925.1, ZP_{—}03003629.1, YP_{—}002387809.1, ZP_{—}03043524.1, YP_{—}001724305.1, ZP_{—}03068335.1, CBJ01980.1, AEJ57562.1, NP_{—}416843.1, ZP_{—}07135079.1, ZP_{—}07247352.1, ZP_{—}07590743.1, EFU96242.1, EFZ69715.1,
and especially preferably
NP_{—}744285.1, YP_{—}004701152.1, ADR61111.1, YP_{—}001268914.1, YP_{—}001667915.1, ABP88736.1, YP_{—}001748526.1, Q9AHY3.2, YP_{—}004713990.1, YP_{—}001172246.1, AEA83639.1, AEA82038.1, YP_{—}001170648.1, YP_{—}004712521.1, YP_{—}002871195.1, YP_{—}349607.1, YP_{—}259059.1, ZP_{—}07774142.1, NP_{—}418288.1, NP_{—}416843.1, ZP_{—}07593201.1, ZP_{—}07590743.1,
and
proteins with a polypeptide sequence in which up to 60%, preferably up to 25%, especially preferably up to 15%, in particular up to 10, 9, 8, 7, 6, 5, 4, 3, 2, 1% of the amino acid residues are modified in comparison with the abovementioned reference sequences by deletion, insertion, substitution, or a combination thereof and which still have at least 50%, preferably 65%, especially preferably 80%, in particular more than 90%, of the activity of the protein with the corresponding abovementioned reference sequence, where 100% activity of the reference protein is understood as meaning the increase of the activity of the cells used as biocatalyst, that is to say the amount of substance reacted per unit time, based on the cell weight used (units per gram of cell dry weight [U/g CDW]), compared with the activity of the biocatalyst without the presence of the reference protein, where activity in this context and in the context of the determination of the activity of the enzyme E_{d} and Eₑ is generally understood in particular as meaning conversion of 2-dodecenoyl-CoA thioester into 3-oxododecanoyl-CoA thioester.

### Specific Enzymes E_{f}

[0151] Furthermore, it is preferred according to the invention that the enzyme E_{f} in the cells according to the invention is one which comprises sequences selected from among:

YP_{—}026272.1, YP_{—}002389323.1, EGB30581.1, YP_{—}001460637.1, YP_{—}001727089.1, CAB40810.1, EGK16565.1, NP_{—}709649.1, YP_{—}001882545.1, ZP_{—}08356522.1, ZP_{—}06664573.1, AAA67642.1, ADA76222.1, EGK17812.1, YP_{—}405326.1, YP_{—}003236969.1, ZP_{—}06659935.1, YP_{—}410143.1, NP_{—}290475.1, ZP_{—}03027945.1, EFZ59092.1, YP_{—}002295406.1, CBG37050.1, EGP22872.1, EGE62411.1, EGC97040.1, ZP_{—}05435276.1, YP_{—}002400349.1, EGB59498.1, EFW54756.1, ZP_{—}08361144.1, YP_{—}001465329.1, YP_{—}002384701.1, YP_{—}002409079.1, ZP_{—}06655947.1, YP_{—}002414995.1, EGB69559.1, YP_{—}859446.1, EGC05061.1, ZP_{—}02904263.1, ZP_{—}08386168.1, YP_{—}543378.1, ZP_{—}08366394.1, ZP_{—}03066325.1, YP_{—}001746177.1, ZP_{—}07154548.1, ZP_{—}03070708.1, NP_{—}756651.1, YP_{—}312775.1, YP_{—}671919.1, YP_{—}002331615.1, YP_{—}003367348.1, ZP_{—}07449249.1, ZP_{—}04558440.1, ZP_{—}06354347.1, YP_{—}001451792.1, YP_{—}004732312.1, ZP_{—}06938722.1, NP_{—}457770.1, ZP_{—}02834646.1, ZP_{—}02658975.1, ZP_{—}03221210.1, EFY10008.1, YP_{—}001591070.1, YP_{—}218866.1, YP_{—}003943710.1, ZP_{—}03086141.1, ZP_{—}03163187.1, ZP_{—}08495783.1, EGE35936.1, YP_{—}003615423.1, YP_{—}002228261.1, YP_{—}002148907.1, ZP_{—}05970963.1, YP_{—}002241092.1, YP_{—}004591812.1, YP_{—}001178656.1, ZP_{—}08302761.1, YP_{—}002917175.1, YP_{—}001337974.1, Q9F0Y6.1, ZP_{—}06014072.1, YP_{—}001439748.1, YP_{—}003208639.1, 3GOA_A, YP_{—}003739634.1, ZP_{—}06192593.1, YP_{—}001906199.1, YP_{—}001476498.1, YP_{—}003019596.1, YP_{—}003261566.1, ZP_{—}03831341.1, ZP_{—}07380062.1, YP_{—}048334.1, YP_{—}003933022.1, ZP_{—}07953301.1, YP_{—}004114075.1, YP_{—}002647269.1, ADP 11111.1, ZP_{—}03827988.1, ZP_{—}06638308.1, YP_{—}004214865.1, YP_{—}003518495.1, ZP_{—}04616541.1, BAK13440.1, CBX79036.1, YP_{—}003529580.1, ZP_{—}04628384.1, ZP_{—}04634365.1, ZP_{—}04641537.1, ZP_{—}04612254.1, ZP_{—}04637126.1, YP_{—}003331801.1, YP_{—}001004652.1, YP_{—}004296469.1, YP_{—}003006181.1, ZP_{—}04620755.1, YP_{—}003885046.1, ZP_{—}04624648.1, NP_{—}667801.1, EGI89588.1, YP_{—}128320.1, ZP_{—}01221705.1, YP_{—}002989324.1, ZP_{—}01236909.1, ZP_{—}01161146.1, ZP_{—}08310904.1, YP_{—}003713992.1, YP_{—}003466461.1, NP_{—}931576.1, YP_{—}003042703.1, ZP_{—}06050959.1, EGF42157.1, ZP_{—}00992844.1, YP_{—}002415748.1, ZP_{—}01065522.1, ZP_{—}05883432.1, ZP_{—}05879948.1, ZP_{—}06156528.1, ZP_{—}05927570.1, ZP_{—}07189177.1, YP_{—}004564871.1, ZP_{—}01870126.1, ZP_{—}02196042.1, YP_{—}003911299.1, ZP_{—}01815882.1, NP_{—}796408.1, YP_{—}004394587.1, ZP_{—}08518444.1, YP_{—}854675.1, ZP_{—}07742014.1, ZP_{—}01135243.1, YP_{—}002154795.1, NP_{—}759945.1, YP_{—}001143923.1, NP_{—}932821.1, Q5E8X7.2, ZP_{—}08568928.1, ZP_{—}06078671.1, ZP_{—}05718021.1, ZP_{—}01948567.1, YP_{—}203407.3, ZP_{—}04923725.1, ZP_{—}05719937.1, YP_{—}002309469.1, ZP_{—}06179384.1, ZP_{—}06048881.1, ZP_{—}01979851.1, ZP_{—}01262259.1, ZP_{—}01957951.1, ZP_{—}04405431.1, ZP_{—}08098152.1, ZP_{—}06034494.1, YP_{—}001758416.1, ZP_{—}04414293.1, ZP_{—}06040414.1, ZP_{—}01682043.1, NP_{—}232385.1, ZP_{—}05883854.1, YP_{—}002264298.1, ZP_{—}01987792.1, YP_{—}338567.1, ZP_{—}01900694.1, YP_{—}001672250.1, YP_{—}925913.1, YP_{—}001499881.1, ZP_{—}02158913.1, YP_{—}001471763.1, NP_{—}715662.1, YP_{—}748713.1, YP_{—}736078.1, ZP_{—}08568623.1, ZP_{—}02958885.2, YP_{—}004067125.1, ZP_{—}08409549.1, YP_{—}001181547.1, ADV52503.1, YP_{—}732156.1, YP_{—}001092150.1, YP_{—}003554800.1, YP_{—}001048425.1, YP_{—}961419.1, YP_{—}561034.1, ZP_{—}06125607.2, YP_{—}867674.1, YP_{—}001443701.1, ZP_{—}05943241.1, ZP_{—}05121169.1, ZP_{—}05974167.1, ZP_{—}03318463.1, ZP_{—}08620875.1, ZP_{—}01042073.1, YP_{—}154403.1, ZP_{—}04717155.1, ZP_{—}03805050.1, YP_{—}004468426.1, ZP_{—}03841336.1, YP_{—}002153225.1, YP_{—}004425807.1, ZP_{—}03351120.1, YP_{—}659788.1, YP_{—}004436298.1, YP_{—}267150.1, ZP_{—}06034790.1, YP_{—}003145205.1, ZP_{—}03561780.1, YP_{—}003810248.1, ZP_{—}05043383.1, YP_{—}693373.1, ZP_{—}01306166.1, YP_{—}004313956.1, YP_{—}790159.1, ZP_{—}06877967.1, NP_{—}251703.1, YP_{—}004482148.1, EGH66370.1, EGH10832.1, YP_{—}349606.1, YP_{—}236359.1, ZP_{—}07263340.1, EGH95844.1, ZP_{—}03368595.1, NP_{—}793296.1, ZP_{—}01165108.1, 1WDK_C, P28790.2, YP_{—}259060.1, ZP_{—}01074263.1, ZP_{—}04587908.1, EGH45981.1, ZP_{—}07774144.1, EGH84449.1, YP_{—}958424.1, YP_{—}275369.1, ZP_{—}07005686.1, YP_{—}001172247.1, YP_{—}004352962.1, ACP17922.1, YP_{—}002871196.1, YP_{—}435876.1, ZP_{—}01739262.1, YP_{—}003557880.1, ZP_{—}01892767.1, ZP_{—}08142929.1, ZP_{—}08462036.1, YP_{—}004701153.1, YP_{—}001667916.1, YP_{—}001280989.1, YP_{—}001268913.1, Q93Q11.1, ZP_{—}05619304.1, AEA79634.1, Q9R9W0.1, NP_{—}744286.1, YP_{—}001187077.1, YP_{—}609234.1, ADP97277.1, YP_{—}045110.1, YP_{—}004379417.1, YP_{—}003626259.1, ZP_{—}06692405.1, ZP_{—}06063436.1, YP_{—}003733839.1, EGE12166.1, ZP_{—}05824703.1, EGE26385.1, EGE13530.1, YP_{—}004474975.1, YP_{—}001708315.1, EGE 16076.1, ZP_{—}06726496.1, ZP_{—}06067276.1, ZP_{—}06058513.1, ZP_{—}06068412.1, ZP_{—}06157093.1, ZP_{—}03822267.1, A3M1H9.2, YP_{—}001340442.1, ZP_{—}05362446.1, ABP88737.1, ZP_{—}01219813.1, ZP_{—}08638730.1, YP_{—}265215.1, YP_{—}581487.1, YP_{—}003896828.1, YP_{—}002798636.1, ZP_{—}01678475.1, ZP_{—}05946075.1, YP_{—}527080.1, ZP_{—}08554005.1, ZP_{—}03360083.1, YP_{—}574438.1, YP_{—}003073152.1, YP_{—}001083375.1, ZP_{—}08648989.1, YP_{—}001982171.1, ZP_{—}05096741.1, ZP_{—}03336985.1, ZP_{—}01103277.1, ZP_{—}07136312.1, ZP_{—}08328590.1, ZP_{—}05128805.1, EGH76239.1, ZP_{—}03377529.1, CBA71811.1, EFZ47010.1, ZP_{—}03377530.1, ZP_{—}07136311.1, EFZ47009.1, EGH29725.1, YP_{—}003022611.1, YP_{—}002138248.1, ZP_{—}01462439.1, ZP_{—}06499584.1, YP_{—}004669687.1, YP_{—}633289.1, ZP_{—}01907074.1, YP_{—}001611010.1, ADI22030.1, ZP_{—}03026937.1, YP_{—}580525.1, YP_{—}003265025.1, YP_{—}001525888.1, YP_{—}002298157.1, YP_{—}002945338.1, YP_{—}003271056.1, YP_{—}004198848.1, ZP_{—}01895445.1, ZP_{—}08636846.1, ADP95813.1, ZP_{—}03357270.1, YP_{—}002535575.1, YP_{—}160280.1, YP_{—}385012.1, YP_{—}004154467.1, YP_{—}742957.1, YP_{—}984918.1, ZP_{—}07949467.1, YP_{—}002552054.1, YP_{—}003439807.1, YP_{—}002919224.1, YP_{—}001475439.1, ZP_{—}07652842.1, YP_{—}001335140.1, YP_{—}972400.1, ZP_{—}08308052.1, YP_{—}001749490.1, YP_{—}004594280.1, ZP_{—}05360584.1, YP_{—}002490812.1, ZP_{—}03336986.1, YP_{—}004236457.1, ZP_{—}08387650.1, YP_{—}046370.1, ZP_{—}03823670.1, AEJ97944.1, ZP_{—}06188204.1, ABF82237.1, ZP_{—}06016043.1, YP_{—}046135.1, YP_{—}942111.1, ZP_{—}01614052.1, YP_{—}001341942.1, YP_{—}004713534.1, ZP_{—}01460231.1, YP_{—}001630800.1, YP_{—}001264278.1, CAD76924.1, ZP_{—}07200324.1, YP_{—}550745.1, YP_{—}001413963.1, YP_{—}002132758.1, ZP_{—}05972210.1, ZP_{—}06065848.1, ZP_{—}08209169.1, ZP_{—}06061642.1, ZP_{—}05109438.1, YP_{—}001419321.1, YP_{—}463572.1, YP_{—}608369.1, YP_{—}001683323.1, AEA83130.1, YP_{—}001230361.1, YP_{—}001832875.1, YP_{—}002237684.1, AAN39378.1, YP_{—}001019613.1, YP_{—}426398.1, ZP_{—}03543802.1, YP_{—}001171793.1, YP_{—}002138936.1, YP_{—}001562369.1, ZP_{—}01786296.1, YP_{—}001528043.1, NP_{—}881363.1, ZP_{—}04625099.1, ZP_{—}02187462.1, YP_{—}002355162.1, YP_{—}248479.1, ZP_{—}07043392.1, YP_{—}002028041.1, YP_{—}001900023.1, ZP_{—}01792340.1, ZP_{—}03541158.1, NP_{—}438930.1, ZP_{—}04464778.1, YP_{—}003278968.1, YP_{—}004490499.1, ZP_{—}07662038.1, AAM48101.1, YP_{—}422117.1, YP_{—}524752.1, YP_{—}918568.1, YP_{—}001264814.1, YP_{—}003807823.1, YP_{—}001260276.1, ZP_{—}07046088.1, ZP_{—}01784141.1, ZP_{—}05135853.1, YP_{—}002982015.1, EEZ80724.1, YP_{—}001292714.1, YP_{—}001971860.1, YP_{—}788379.1, ZP_{—}05783989.1, YP_{—}004415862.1, CAE45106.1, YP_{—}004618019.1, ZP_{—}01126529.1, ZP_{—}06062289.1, YP_{—}004538662.1, NP_{—}248919.1, YP_{—}001098905.1, YP_{—}003847633.1, YP_{—}002432816.1, YP_{—}003280245.1, A64092, ZP_{—}08404839.1, YP_{—}003466069.1, YP_{—}001348923.1, YP_{—}158582.1, YP_{—}004229600.1, ZP_{—}07797976.1, YP_{—}001416028.1, YP_{—}001747677.1, YP_{—}002362051.1, YP_{—}931973.1, ZP_{—}08505255.1, EGP53986.1, NP_{—}250427.1, YP_{—}366806.1, ZP_{—}04638299.1, ZP_{—}08485306.1, YP_{—}001675166.1, AAA23322.1, NP_{—}927515.1, AAR83740.1, YP_{—}433439.1, YP_{—}001668851.1, YP_{—}001713606.1, YP_{—}002354475.1, ZP_{—}06548530.1, ZP_{—}04764695.1, ZP_{—}01910282.1, YP_{—}004146469.1, YP_{—}095382.1, ZP_{—}06495825.1, YP_{—}003777379.1, ZP_{—}01914912.1, ZP_{—}06895226.1, YP_{—}004379898.1, YP_{—}003365234.1, YP_{—}001784146.1, YP_{—}003021900.1, YP_{—}004555586.1, YP_{—}001101071.1, CBW99592.1, YP_{—}003254723.1, AAG30258.1, YP_{—}004536011.1, NP_{—}884797.1, NP_{—}635761.1, YP_{—}002429235.1, YP_{—}001901798.1, ZP_{—}06485970.1, YP_{—}123631.1, YP_{—}001352245.1, ZP_{—}03697428.1, ZP_{—}05824476.1, ZP_{—}01014491.1, EGH60624.1, YP_{—}004028852.1, ZP_{—}04633718.1, YP_{—}001846659.1, ZP_{—}04933402.1, YP_{—}003731942.1, YP_{—}001345710.1, YP_{—}003979747.1, ZP_{—}00053266.1, YP_{—}126656.1, YP_{—}003442067.1, YP_{—}585810.1, ZP_{—}01614053.1, ZP_{—}06690229.1, YP_{—}001858908.1, ZP_{—}01128624.1, NP_{—}888558.1, ZP_{—}05827098.1, Q8VPF1.1, YP_{—}004473788.1, EGH77345.1, P45363.1, EGH44350.1, YP_{—}001676522.1, ZP_{—}05824514.1, ZP_{—}06487592.1, ZP_{—}02887415.1, ZP_{—}04761513.1, YP_{—}003377502.1, YP_{—}001188713.1, ZP_{—}01167911.1, ZP_{—}06690267.1, YP_{—}004680403.1, YP_{—}003731982.1, YP_{—}002800937.1, YP_{—}001758618.1, YP_{—}004380648.1, YP_{—}001188079.1, YP_{—}001707349.1, YP_{—}004687867.1, CAZ89607.1, ZP_{—}05827058.1, ZP_{—}08142248.1, YP_{—}195739.1, YP_{—}004703691.1, YP_{—}001354779.1, ZP_{—}08627639.1, ZP_{—}04936650.1, NP_{—}642338.1, ZP_{—}03451105.1, YP_{—}001713567.1, EFV87627.1, YP_{—}728366.1, YP_{—}002912837.1, YP_{—}001707333.1, YP_{—}363794.1, YP_{—}003524466.1, YP_{—}959751.1, YP_{—}606872.1, YP_{—}102034.1, YP_{—}002942733.1, YP_{—}002238110.1, ZP_{—}05032457.1, YP_{—}001846620.1, YP_{—}004153168.1, ZP_{—}02462362.1, YP_{—}003777513.1, YP_{—}199120.1, ZP_{—}08179077.1, ZP_{—}08188845.1, YP_{—}107279.1, ADP98459.1, YP_{—}004157409.1, YP_{—}610092.1, EGP55478.1, CBJ37328.1, ZP_{—}08181461.1, ZP_{—}06842278.1, ZP_{—}06703672.1, ADR61907.1, ZP_{—}06688595.1, ZP_{—}04934614.1, ZP_{—}07262554.1, YP_{—}786611.1, YP_{—}003439146.1, YP_{—}003592852.1, YP_{—}001747891.1, YP_{—}004386570.1, Q51956.1, YP_{—}004593695.1, YP_{—}560516.1, ZP_{—}06731844.1, YP_{—}001897101.1, ZP_{—}08388430.1, YP_{—}001166210.1, YP_{—}557015.1, ZP_{—}06843809.1, EGP42659.1, YP_{—}002005592.1, YP_{—}002871766.1, YP_{—}555845.1, ZP_{—}05921114.1, NP_{—}746745.1, NP_{—}637343.1, ZP_{—}02243308.1, YP_{—}001267798.1, ZP_{—}02354510.1, NP_{—}841567.1, ZP_{—}08177693.1, YP_{—}004703877.1, YP_{—}001166143.1, EGH73771.1, ZP_{—}06489206.1, ZP_{—}01892079.1, YP_{—}934562.1, ADY81955.1, EGB73439.1, NP_{—}520373.1, YP_{—}003905682.1, EGH61062.1, YP_{—}001894311.1, ZP_{—}02245330.1, YP_{—}918778.1, YP_{—}001120651.1, YP_{—}003612896.1, YP_{—}004125334.1, ZP_{—}07952596.1, YP_{—}001479268.1, ZP_{—}07043083.1, YP_{—}003644271.1, NP_{—}421210.1, ZP_{—}02882590.1, EGP25245.1, YP_{—}233920.1, EGD00226.1, YP_{—}004418315.1, ADY81914.1, ZP_{—}04944762.1, YP_{—}003603999.1, YP_{—}001060552.1, ZP_{—}03026966.1, YP_{—}441123.1, YP_{—}201177.1, ZP_{—}05117283.1, YP_{—}004232360.1, YP_{—}002802211.1, YP_{—}106085.1, YP_{—}258448.1, YP_{—}001989549.1, NP_{—}945866.1, ZP_{—}03573123.1, YP_{—}283604.1, YP_{—}004702122.1, ZP_{—}03398400.1, YP_{—}105310.1, YP_{—}001479310.1, CAC41637.1, ZP_{—}02372747.1, YP_{—}001578772.1, ZP_{—}08181762.1, ZP_{—}00439074.2, ADX92638.1, ZP_{—}03790444.1, YP_{—}110295.1, YP_{—}002439726.1, YP_{—}004361986.1, ZP_{—}04946665.1, YP_{—}003751825.1, YP_{—}001061488.1, ZP_{—}03545148.1, ZP_{—}01767462.1, ZP_{—}01769818.1, YP_{—}990241.1, YP_{—}002382777.1, YP_{—}002898389.1, YP_{—}003452421.1, EGH66881.1, CBW26817.1, YP_{—}004352451.1, EGC07165.1, YP_{—}003982691.1, ZP_{—}02906520.1, YP_{—}410799.1, YP_{—}001189077.1, YP_{—}004226900.1, ADP96997.1, YP_{—}237079.1, YP_{—}002946310.1, YP_{—}004029037.1, NP_{—}745423.1, ZP_{—}08139209.1, YP_{—}004294989.1, NP_{—}251630.1, EGH73592.1, ZP_{—}04934925.1, ZP_{—}03583227.1, ZP_{—}03584241.1, YP_{—}004684330.1, YP_{—}004501533.1, YP_{—}001186637.1, YP_{—}003980170.1, AEJ98540.1, YP_{—}004688333.1, YP_{—}003276725.1, EGH11975.1, YP_{—}276147.1, YP_{—}790233.1, ZP_{—}01736635.1, YP_{—}002440908.1, YP_{—}002230040.1, YP_{—}724980.1, YP_{—}004231717.1, ZP_{—}01226775.1, ZP_{—}03454556.1, ZP_{—}05586076.1, ZP_{—}02890239.1, YP_{—}001172996.1, ZP_{—}02377875.1, ZP_{—}07202399.1, YP_{—}774661.1, YP_{—}440314.2, YP_{—}443408.1, ZP_{—}06878044.1, ZP_{—}08274339.1, YP_{—}001618203.1, ZP_{—}08631485.1, ZP_{—}01545529.1, ZP_{—}03267843.1, ZP_{—}07797009.1, YP_{—}003376084.1, EGH21143.1, YP_{—}003753513.1, YP_{—}004282234.1, YP_{—}726356.1, ZP_{—}06014951.1, YP_{—}109637.1, ZP_{—}06461447.1, YP_{—}001795795.1, YP_{—}621981.1, ZP_{—}07794257.1, ZP_{—}05060451.1, YP_{—}002919830.1, YP_{—}001796645.1, NP_{—}794063.1, ZP_{—}01365347.1, YP_{—}003610065.1, YP_{—}001462757.1, YP_{—}001807185.1, ZP_{—}04928407.1, YP_{—}002229986.1, ZP_{—}02883901.1, YP_{—}370284.1, ZP_{—}05053491.1, AAC24332.1, ZP_{—}04929241.1, ZP_{—}00943679.1, YP_{—}001766064.1, YP_{—}001670661.1, YP_{—}003296167.1, YP_{—}003773673.1, NP_{—}250691.1, ZP_{—}05823066.1, YP_{—}004381309.1, YP_{—}004714773.1, YP_{—}746962.1, YP_{—}002513585.1, YP_{—}294674.1, YP_{—}004593822.1, YP_{—}622032.1, YP_{—}001897940.1, YP_{—}001335713.1, YP_{—}001856626.1, YP_{—}791238.1, YP_{—}004140309.1, YP_{—}001269802.1, ZP_{—}06879064.1, ZP_{—}01736318.1, ZP_{—}02886139.1, ZP_{—}04941413.1, YP_{—}001670851.1, YP_{—}371023.1, YP_{—}002980343.1, YP_{—}002795605.1, ZP_{—}06069679.1, ZP_{—}02463309.1, ZP_{—}05785212.1, YP_{—}001793049.1, YP_{—}003965283.1, YP_{—}001233153.1, YP_{—}299776.1, ZP_{—}06498740.1, AEJ99148.1, YP_{—}004685690.1, YP_{—}003746771.1, YP_{—}004381943.1, YP_{—}004378973.1, YP_{—}004314684.1, EGH79619.1, ZP_{—}04882546.1, YP_{—}347001.1, YP_{—}347471.1, YP_{—}001757758.1, YP_{—}002911324.1, NP_{—}518596.1, ZP_{—}00948908.1, YP_{—}442777.1, YP_{—}002874183.1, YP_{—}002230989.1, YP_{—}004360850.1, ABC36127.1, YP_{—}004696127.1, YP_{—}002799527.1, YP_{—}001631275.1, YP_{—}626125.1, ZP_{—}05090649.1, ZP_{—}07774002.1, ZP_{—}04940525.1, AEK60371.1, ADR60119.1, YP_{—}102981.1, YP_{—}003451423.1, NP_{—}743536.1, CAA45255.1,
in particular
YP_{—}790159.1, ZP_{—}06877967.1, NP_{—}251703.1, EGH66370.1, EGH10832.1, YP_{—}349606.1, YP_{—}236359.1, ZP_{—}07263340.1, EGH95844.1, NP_{—}793296.1, 1WDK_C, P28790.2, YP_{—}259060.1, ZP_{—}04587908.1, EGH45981.1, ZP_{—}07774144.1, EGH84449.1, YP_{—}275369.1, ZP_{—}07005686.1, YP_{—}001172247.1, YP_{—}004352962.1, ACP17922.1, YP_{—}002871196.1, ZP_{—}08142929.1, YP_{—}004701153.1, YP_{—}001667916.1, YP_{—}001268913.1, Q93Q11.1, Q9R9W0.1, NP_{—}744286.1, YP_{—}001187077.1, YP_{—}609234.1, YP_{—}004379417.1, YP_{—}004474975.1, ABP88737.1, EGH76239.1, EGH29725.1, ZP_{—}06499584.1, YP_{—}001749490.1, ABF82237.1, YP_{—}004713534.1, CAD76924.1, YP_{—}608369.1, AEA83130.1, YP_{—}001171793.1, YP_{—}788379.1, CAE45106.1, NP_{—}248919.1, YP_{—}001348923.1, ZP_{—}07797976.1, YP_{—}001747677.1, NP_{—}250427.1, AAR83740.1, YP_{—}001668851.1, ZP_{—}06495825.1, YP_{—}004379898.1, EGH60624.1, ZP_{—}04933402.1, YP_{—}001345710.1, Q8VPF1.1, YP_{—}004473788.1, EGH77345.1, EGH44350.1, YP_{—}001188713.1, YP_{—}004380648.1, YP_{—}001188079.1, ZP_{—}08142248.1, YP_{—}004703691.1, ZP_{—}04936650.1, YP_{—}606872.1, YP_{—}610092.1, ADR61907.1, ZP_{—}04934614.1, ZP_{—}07262554.1, YP_{—}001747891.1, Q51956.1, YP_{—}002871766.1, NP_{—}746745.1, YP_{—}001267798.1, YP_{—}004703877.1, EGH73771.1, EGH61062.1, YP_{—}233920.1, YP_{—}258448.1, YP_{—}004702122.1, ZP_{—}03398400.1, YP_{—}002439726.1, EGH66881.1, YP_{—}004352451.1, YP_{—}001189077.1, YP_{—}237079.1, NP_{—}745423.1, ZP_{—}08139209.1, NP_{—}251630.1, EGH73592.1, ZP_{—}04934925.1, YP_{—}001186637.1, EGH11975.1, YP_{—}276147.1, YP_{—}790233.1, YP_{—}002440908.1, YP_{—}001172996.1, ZP_{—}06878044.1, ZP_{—}07797009.1, EGH21143.1, ZP_{—}06461447.1, ZP_{—}07794257.1, NP_{—}794063.1, ZP_{—}01365347.1, ZP_{—}04928407.1, AAC24332.1, ZP_{—}04929241.1, YP_{—}001670661.1, NP_{—}250691.1, YP_{—}004381309.1, YP_{—}004714773.1, YP_{—}791238.1, YP_{—}001269802.1, ZP_{—}06879064.1, YP_{—}001670851.1, ZP_{—}06498740.1, YP_{—}004381943.1, YP_{—}004378973.1, EGH79619.1, YP_{—}347001.1, YP_{—}347471.1, YP_{—}002874183.1, ZP_{—}07774002.1, ADR60119.1, NP_{—}743536.1, YP_{—}001269653.1, ZP_{—}06482365.1, ADI95330.1, ZP_{—}07003619.1, BAB96553.1, ZP_{—}07777009.1, ABA10831.1, YP_{—}273131.1, YP_{—}259428.1, EFW86233.1, EGH85840.1, ZP_{—}07774597.1, EGH54613.1, YP_{—}004353129.1, YP_{—}002871014.1, YP_{—}001171232.1, EGH67454.1, EFW82139.1, ZP_{—}04590526.1, EGH58132.1, EGH06629.1, EGH99157.1, ZP_{—}05638078.1, NP_{—}790796.1, AEE59172.1, YP_{—}026272.1, YP_{—}002389323.1, EGB30581.1, YP_{—}001460637.1, YP_{—}001727089.1, CAB40810.1, ZP_{—}03049054.1, ZP_{—}08356522.1, ZP_{—}06664573.1, AAA67642.1, YP_{—}003236969.1, ZP_{—}06659935.1, NP_{—}290475.1, ZP_{—}03027945.1, EFZ59092.1, YP_{—}002295406.1, CBG37050.1, EGP22872.1, EGE62411.1, YP_{—}002400349.1, EGB59498.1, ZP_{—}08361144.1, YP_{—}001465329.1, YP_{—}002409079.1, ZP_{—}06655947.1, YP_{—}002414995.1, EGB69559.1, YP_{—}859446.1, ZP_{—}08386168.1, YP_{—}543378.1, ZP_{—}08366394.1, YP_{—}001746177.1, ZP_{—}07154548.1, ZP_{—}03070708.1, NP_{—}756651.1, YP_{—}671919.1, YP_{—}002331615.1, ZP_{—}07449249.1, ZP_{—}06938722.1, ZP_{—}03086141.1, ZP_{—}07189177.1, ZP_{—}07136312.1, EFZ47010.1, ZP_{—}07136311.1, EFZ47009.1, ZP_{—}03026937.1, EGB73439.1, EGP25245.1, ZP_{—}03026966.1, YP_{—}001462757.1, CAP76727.1, YP_{—}670163.1,
and especially preferably
YP_{—}026272.1, AAA67642.1, ZP_{—}07593202.1, YP_{—}004701153.1, YP_{—}001667916.1, YP_{—}001268913.1, Q9R9W0.1, NP_{—}744286.1, ABP88737.1, YP_{—}001749490.1, YP_{—}001747677.1, YP_{—}001668851.1, YP_{—}004703691.1, ADR61907.1, YP_{—}001747891.1, Q51956.1, NP_{—}746745.1, YP_{—}001267798.1, YP_{—}004703877.1, YP_{—}004702122.1, NP_{—}745423.1, AAC24332.1, YP_{—}001670661.1, YP_{—}001269802.1, YP_{—}001670851.1, ADR60119.1, NP_{—}743536.1, YP_{—}001269653.1, ADI95330.1, BAB96553.1, YP_{—}001172247.1, YP_{—}004713534.1, AEA83130.1, YP_{—}001171793.1, YP_{—}001172996.1, YP_{—}004714773.1, YP_{—}001171232.1, YP_{—}349606.1, YP_{—}259060.1, ZP_{—}07774144.1, YP_{—}002871196.1, ABF82237.1, YP_{—}002871766.1, YP_{—}258448.1, YP_{—}347001.1, YP_{—}347471.1, YP_{—}002874183.1, ZP_{—}07774002.1, ZP_{—}07777009.1, YP_{—}259428.1, ZP_{—}07774597.1, YP_{—}002871014.1,
AAC72881.1, ABB71579.1, CAC19934.1, AAC49180.1 (encoded by SEQ ID No.: 10), AAC49783.1, AAC49179.1, CAB60830.1, ABB71581.1, AAC49269.1, CAC 19933.1, CAA54060.1, AAC72882.1, 039513.1, AAC49784.1, ABO38558.1, ABO38555.1, ABO38556.1, ABO38554.1, ADB79568.1, ADB79569.1, ACQ57188.1, ACQ57189.1, ABK96561.1, ACQ63293.1, ACQ57190.1, Q9SQI3.1, ABU96744.1, ABC47311.1, XP_{—}002324962.1, AAD01982.1, AAB51525.1, ACV40757.1, XP_{—}002309244.1, CBI28125.3, ABD91726.1, XP_{—}002284850.1, XP_{—}002309243.1, XP_{—}002515564.1, ACR56792.1, ACR56793.1, XP_{—}002892461.1, ABI18986.1, NP_{—}172327.1, CAA85387.1, CAA85388.1, ADA79524.1, ACR56795.1, ACR56794.1, CAN81819.1, ACF17654.1, AAB71729.1, ABH11710.1, ACQ57187.1, AAX51637.1, AAB88824.1, AAQ08202.1, AAB71731.1, AAX51636.1, CAC80370.1, CAC80371.1, AAG43858.1, ABD83939.1, AAD42220.2, AAG43860.1, AAG43861.1, AAG43857.1, AAL15645.1, AAB71730.1, NP_{—}001068400.1, EAY86877.1, NP_{—}001056776.1, XP_{—}002436457.1, NP_{—}001149963.1, ACN27901.1, EAY99617.1, ABL85052.1, XP_{—}002437226.1, NP_{—}001151366.1, ACF88154.1, NP_{—}001147887.1, XP_{—}002453522.1, BAJ99650.1, EAZ37535.1, EAZ01545.1, AAN17328.1, EAY86884.1, EEE57469.1, Q41635.1, AAM09524.1, Q39473.1, NP_{—}001057985.1, AAC49001.1, XP_{—}001752161.1, XP_{—}001770108.1, XP_{—}001784994.1, XP_{—}002318751.1, NP_{—}001047567.1, XP_{—}002322277.1, XP_{—}002299627.1, XP_{—}002511148.1, CBI15695.3, XP_{—}002299629.1, XP_{—}002280321.1, CAN60643.1, XP_{—}002459731.1, XP_{—}002975500.1, XP_{—}002962077.1, XP_{—}001773771.1, NP_{—}001151014.1, XP_{—}002317894.1, XP_{—}002971008.1, XP_{—}001774723.1, XP_{—}002280147.1, XP_{—}002526311.1, XP_{—}002517525.1, XP_{—}001764527.1, ABI20759.1, BAD73184.1, XP_{—}002987091.1, XP_{—}002985480.1, CBI26947.3, ABI20760.1, XP_{—}002303055.1, XP_{—}002885681.1, ADH03021.1, XP_{—}002532744.1, EAY74210.1, EEC84846.1, EEE54649.1, AAG35064.1, AAC49002.1, CAD32683.1, ACF78226.1, BAJ96402.1, XP_{—}002462626.1, NP_{—}001130099.1, XP_{—}002462625.1, ABX82799.3, Q42712.1, NP_{—}193041.1, AAB51524.1, NP_{—}189147.1, ABR18461.1, XP_{—}002863277.1, AAC72883.1, AAA33019.1, CBI40881.3, XP_{—}002262721.1, AAB51523.1, NP_{—}001063601.1, ADB79567.1, AAL77443.1, AAL77445.1, AAQ08223.1, AAL79361.1, CAA52070.1, AAA33020.1, CAA52069.1, XP_{—}001785304.1, CAC39106.1, XP_{—}002992591.1, XP_{—}002968049.1, XP_{—}001770737.1, XP_{—}001752563.1, AAG43859.1, XP_{—}002978911.1, XP_{—}002977790.1, ACB29661.1, XP_{—}002314829.1, XP_{—}002991471.1, EAZ45287.1, XP_{—}002986974.1, EEC73687.1, XP_{—}002312421.1, ACJ84621.1, NP_{—}001150707.1, AAD28187.1, XP_{—}001759159.1, XP_{—}001757193.1, XP_{—}002322077.1, ABE01139.1, XP_{—}002447294.1, AAX54515.1, AAD33870.1, AAX54514.1, CBI15694.3, XP_{—}002270653.1, AAZ83073.1, CAC14164.1, XP_{—}001753224.1, CBI35766.3, ACU22895.1, BAC43222.1, XP_{—}002965875.1, AAX54516.1, XP_{—}002983123.1, XP_{—}002447046.1, ACL52706.1, CAA06001.1, XP_{—}001772711.1,
and
proteins with a polypeptide sequence in which up to 60%, preferably up to 25%, especially preferably up to 15%, in particular up to 10, 9, 8, 7, 6, 5, 4, 3, 2, 1% of the amino acid residues are modified in comparison with the abovementioned reference sequences by deletion, insertion, substitution, or a combination thereof and which still have at least 50%, preferably 65%, especially preferably 80%, in particular more than 90%, of the activity of the protein with the corresponding abovementioned reference sequence, where 100% activity of the reference protein is understood as meaning the increase of the activity of the cells used as biocatalyst, that is to say the amount of substance reacted per unit time, based on the cell weight used (units per gram of cell dry weight [U/g CDW]), compared with the activity of the biocatalyst without the presence of the reference protein, where activity in this context and in the context of the determination of the activity of the enzyme E_{f} is generally understood in particular as meaning the reaction of 3-oxododecanoyl-CoA thioester and CoA to give decanoyl-CoA thioester and acetyl-CoA.

### Sixth Genetic Modification for Enhancing the Acyl-ACP Thioester Synthesis

[0152] According to the invention, the microorganisms include a sixth genetic modification so that they are capable of forming more acyl-ACP thioester from at least one simple carbon source in comparison with their wild type. An overview over correspondingly desirable genetic modifications can be found in FIG. 1 of WO2008119082, section 1 (fatty acid production increase/product production increase).

[0153] The technical effect of this is that the formation of carboxylic acids and carboxylic acid derivatives which is increased by the first genetic modification, but also of carboxylic acids and carboxylic acid derivatives which are formed in larger amounts due to the second, third, fourth or fifth genetic modification, is increased even further.

Preferred Microorganisms for the Production of Alkan-1-ols, Alkan-1-als, Alkan-1-Amines, Alkanes, Olefins, Alken-1-als, Alken-1-ols and Alken-1-Amines

[0154] If the microorganisms according to the invention are intended to be used in a process for the production of alkan-1-ols, alkan-1-als, alkan-1-amines, alkanes, alken-1-als, alken-1-ols and alken-1-amines and terminal olefins which optionally contain further double bonds, it may be advantageous that the microorganisms according to the invention include a seventh genetic modification comprising an activity of at least one enzyme E₁ that is reduced in comparison with its wild type, selected from the group:

E₁ₐ P450 alkane hydroxylases, which preferably catalyse the following reactions:
reduced haem+alkanoic acid (ester)=oxidized haem+ω-hydroxyalkanoic acid (ester)+H₂O,
2 reduced haem+alkanoic acid (ester)=2 oxidized haem+ω-oxoalkanoic acid (ester)+2H₂O
or
3 reduced haem+alkanoic acid (ester)=alkane monoxygenase+3 oxidized haem+ω-carboxyalkanoic acid (ester)+3H₂O and preferably
component of a reaction system composed of the two enzyme components “cytochrome P450 alkane hydroxylase and NADPH-cytochrome P450 oxidoreductase of EC 1.6.2.4” or component of a reaction system composed of the three enzyme components “cytochrome P450 alkane hydroxylase of the type CYP_{—}153, ferredoxin-NAD(P)⁺ reductases of EC 1.18.1.2 or EC 1.18.1.3 and ferredoxin” and
E_{1b} AlkB alkane hydroxylases of EC 1.14.15.3, which preferably catalyse the following reactions: reduced rubredoxin+alkanoic acid (ester)=oxidized rubredoxin+ω-hydroxyalkanoic acid (ester)+H₂O,
2 reduced rubredoxins+alkanoic acid (ester)=2 oxidized rubredoxins+ω-oxoalkanoic acid (ester)+2H₂O or
3 reduced rubredoxins+alkanoic acid (ester)=alkane monoxygenase+3 oxidized rubredoxins+ω-carboxyalkanoic acid (ester)+3H₂O and preferably
component of a reaction system composed of the three enzyme components “AlkB alkane hydroxylase of EC 1.14.15.3, AlkT rubredoxin-NAD(P)⁺ reductase of EC 1.18.1.1 or EC 1.18.1.4 and rubredoxin AlkG”,
E_{1c} fatty alcohol oxidases of EC 1.1.3.20, which preferably catalyse at least one of the following irreversible reactions:
alkan-1-ol+O₂=alkan-1-al+H₂O₂ or
alkan-1-al+O₂=alkanoic acid+H₂O₂,
E_{1d} AlkJ alcohol dehydrogenases of EC 1.1.99.-, which preferably catalyse at least one of the following reversible reactions:
alkan-1-ol+oxidized acceptor=alkan-1-al+reduced acceptor or alkan-1-al+oxidized acceptor=alkanoic acid+reduced acceptor,
E₁ₑ alcohol dehydrogenases of EC 1.1.1.1 or EC 1.1.1.2, which preferably catalyse at least one of the following reversible reactions:
alkan-1-ol+NAD(P)⁺=alkan-1-al+NAD(P)H+H⁺ or
alkan-1-al+NAD(P)⁺=alkanoic acid+NAD(P)H+H⁺ and
E_{1f} aldehyde dehydrogenases of EC 1.2.1.3, EC 1.2.1.4 or EC 1.2.1.5, which preferably catalyse the following reversible reaction:
alkan-1-al+NAD(P)⁺=alkanoic acid+NAD(P)H+H⁺

[0155] It may be advantageous in particular for the production of alkan-1-ols that the microorganisms according to the invention have an activity of at least one enzyme E₁ₑ and E_{1f} in comparison with their wild type.

[0156] WO2010062480 A2 describes microorganisms which are capable of forming more fatty acids and fatty acid derivatives, in particular fatty alcohols, from at least one simple carbon source in comparison with their wild type, in particular in exemplary embodiments 3, 4, 6 and 7. The document also describes enzymes E₁ₑ which are preferred according to the invention and their sequences, in particular in FIG. 10 and in exemplary embodiments 2 to 7.

[0157] If the microorganisms according to the invention are to be used in a process for the production of alkan-1-ols, alkan-1-als, alkan-1-amines and alkanes, it is especially preferred according to the invention that the activity of such enzymes E₁ₐ to E_{1f}, which catalyse the above-described reactions of an alkan-1-al to give the corresponding alkanoic acid, is reduced.

[0158] If the microorganisms according to the invention are to be used in a process for the production of alkan-1-als, alkan-1-amines, alkanes and 1-alkenes, it is especially preferred according to the invention that the activity of such enzymes E₁ₐ to E₁ₑ, which catalyse the above-described conversion of an alkan-1-al to give the corresponding alkan-1-ol, is reduced.

[0159] If the microorganisms according to the invention are to be used in a process for the production of alkan-1-ols, it is especially preferred according to the invention that the activity of such enzymes E₁ₐ to E₁ₑ, which catalyse the above-described conversion of an alkan-1-ol to give the corresponding alkan-1-al, is reduced.

### Specific Enzymes E₁ₐ

[0160] P450 alkane hydroxylases E₁ₐ which are preferred in this context are selected from among the list

AAO73954.1, AAO73953.1, XP_{—}002546279.1, AAA34353.2, P30607.1, XP_{—}002421627.1, XP_{—}718670.1, CAA39366.1, XP_{—}001527524.1, AAO73955.1, AAO73956.1, XP_{—}002546278.1, EEQ43157.1, XP_{—}718669.1, AAA34354.1, P10615.3, XP_{—}002421628.1, 226487, P16141.3, CAA39367.1, Q9Y757.2, XP_{—}001485567.1, AAO73958.1, XP_{—}001383506.2, XP_{—}460111.2, AAO73959.1, Q12586.1, XP_{—}460112.2, AAO73960.1, Q12589.1, AAO73961.1, XP_{—}460110.2, EEQ43763.1, XP_{—}710174.1, EDK41572.2, XP_{—}001482650.1, CAA75058.1, XP_{—}002548818.1, Q12588.1, XP_{—}002422222.1, XP_{—}001383636.2, XP_{—}001525381.1, XP_{—}002548823.1, P30610.1, AAO73952.1, XP_{—}002548428.1, CAA36197.1, XP_{—}002421126.1, AAA34320.1, P16496.3, P30608.1, P24458.1, XP_{—}717999.1, XP_{—}001383817.1, Q9Y758.1, XP_{—}001482092.1, XP_{—}001383710.2, P30609.1, AAB24479.1, XP_{—}457792.1, XP_{—}001524144.1, XP_{—}457727.2, XP_{—}001525578.1, XP_{—}002616743.1, XP_{—}002614836.1, XP_{—}001525577.1, AAO73957.1, Q12585.1, XP_{—}001386440.2, XP_{—}002616857.1, XP_{—}001483276.1, XP_{—}500402.1, EDK39907.2, XP_{—}500560.1, XP_{—}001211376.1, XP_{—}002560027.1, XP_{—}504857.1, XP_{—}500855.1, XP_{—}504406.1, BAA31433.1, XP_{—}500856.1, XP_{—}501148.1, XP_{—}746567.1, XP_{—}001262425.1, XP_{—}001274843.1, XP_{—}002840588.1, XP_{—}002377641.1, XP_{—}001825995.1, XP_{—}001400739.1, XP_{—}718066.1, CAA35593.1, XP_{—}664735.1, XP_{—}002150795.1, XP_{—}500097.1, XP_{—}002483325.1, XP_{—}504311.1, XP_{—}500273.1, XP_{—}002548817.1, EDP54484.1, XP_{—}755288.1, XP_{—}001260447.1, EFY97851.1, ACD75398.1, ADK36660.1, XP_{—}001213081.1, XP_{—}002377989.1, XP_{—}001826299.1, XP_{—}001554811.1, XP_{—}501667.1, XP_{—}002148942.1, ADK36662.1, XP_{—}002565827.1, P30611.1, XP_{—}001267871.1, XP_{—}002372373.1, EFY84686.1, P43083.1, XP_{—}001263094.1, XP_{—}002148355.1, XP_{—}002568429.1, XP_{—}001817314.1, Q12587.1, XP_{—}001396435.1, XP_{—}001938589.1, XP_{—}001388497.2, XP_{—}663661.1, XP_{—}003295335.1, XP_{—}002152088.1, XP_{—}001212071.1, Q12573.1, XP_{—}002379858.1, XP_{—}001821592.1, XP_{—}002844341.1, XP_{—}001394678.1, ACD75400.1, BAK03594.1, XP_{—}003170343.1, XP_{—}001265480.1, XP_{—}002550661.1, EDP55514.1, XP_{—}001528842.1, XP_{—}749919.1, XP_{—}001593058.1, P30612.1, EGC48494.1, EEH04429.1, XP_{—}001585586.1, XP_{—}003236182.1, XP_{—}001400199.1, EEQ46951.1, XP_{—}721410.1, EGP87864.1, XP_{—}002380808.1, XP_{—}001792771.1, XP_{—}001208515.1, XP_{—}001216161.1, XP_{—}003071804.1, EFW16963.1, XP_{—}002542118.1, XP_{—}001936677.1, EGD95268.1, XP_{—}003015678.1, XP_{—}501748.1, XP_{—}003169562.1, EFY96492.1, XP_{—}682653.1, XP_{—}002421356.1, CAK43439.1, EFY93677.1, XP_{—}747767.1, XP_{—}001244958.1, XP_{—}003019635.1, XP_{—}002847463.1, EGP83273.1, EGR52487.1, XP_{—}002622526.1, XP_{—}002563618.1, CBX99718.1, XP_{—}001552081.1, XP_{—}003066638.1, XP_{—}003176049.1, ACD75402.1, BAA05145.1, XP_{—}002482834.1, XP_{—}001257501.1, XP_{—}001934574.1, XP_{—}001269972.1, XP_{—}001587438.1, XP_{—}001215856.1, XP_{—}002149824.1, XP_{—}001550556.1, XP_{—}003011982.1, XP_{—}001827121.1, XP_{—}003233566.1, XP_{—}003022481.1, EGR47044.1, EFQ34695.1, XP_{—}003170005.1, BAG09241.1, XP_{—}002796370.1, XP_{—}003019300.1, XP_{—}002563873.1, CAK40654.1, EEH19741.1, XP_{—}003012518.1, EGD95716.1, XP_{—}003239409.1, BAJ04363.1, XP_{—}001537012.1, BAE66393.1, EGP85214.1, XP_{—}002487227.1, AAV66104.1, EGE07669.1, XP_{—}362943.2, XP_{—}003016806.1, EFQ27388.1, XP_{—}002384360.1, XP_{—}002836323.1, XP_{—}001274959.1, EFZ03093.1, XP_{—}661521.1, XP_{—}002849803.1, XP_{—}001589398.1, AAR99474.1, XP_{—}003189427.1, XP_{—}001823699.1, XP_{—}364111.1, XP_{—}001262753.1, EFY86805.1, XP_{—}001390153.2, XP_{—}002384738.1, XP_{—}001941811.1, XP_{—}001220831.1, XP_{—}003296981.1, XP_{—}002480829.1, BAD83681.1, XP_{—}001827526.2, XP_{—}369556.1, CAK38224.1, EFQ26532.1, XP_{—}002562328.1, XP_{—}001904540.1, EGO52476.1, XP_{—}002382002.1, XP_{—}001225874.1, XP_{—}958030.2, XP_{—}002540883.1, XP_{—}001908957.1, XP_{—}001559255.1, XP_{—}364102.1, EDP48064.1, XP_{—}365075.1, XP_{—}381460.1, CBX95930.1, XP_{—}003054099.1, XP_{—}361347.2, XP_{—}002846867.1, XP_{—}001214985.1, EFQ35175.1, XP_{—}002479062.1, XP_{—}001908613.1, XP_{—}003345380.1, EGR50567.1, XP_{—}002479350.1, XP_{—}001394417.2, XP_{—}001394159.2, XP_{—}002146776.1, EGP86783.1, EFX02953.1, CAK45889.1, XP_{—}003006887.1, XP_{—}002541427.1, XP_{—}750735.1, XP_{—}001257962.1, EGO51720.1, XP_{—}003005336.1, EGP83197.1, XP_{—}002149832.1, XP_{—}003052680.1, XP_{—}365851.1, XP_{—}001799910.1, XP_{—}003347175.1, XP_{—}002565258.1, EGR48918.1, EGR52524.1, XP_{—}964653.2, XP_{—}002147083.1, XP_{—}002843935.1, EEH19393.1, CAC 10088.1, EEH47609.1, EEQ92528.1, XP_{—}001246560.1, XP_{—}002626168.1, XP_{—}003024880.1, XP_{—}003169255.1, XP_{—}003013780.1, XP_{—}003235691.1, XP_{—}746816.1, EGD98483.1, XP_{—}001389925.2, XP_{—}002842817.1, XP_{—}002797278.1, ADK36666.1, XP_{—}003305469.1, XP_{—}001548471.1, XP_{—}001806478.1, EFQ34989.1, XP_{—}001552987.1, CAC24473.1, XP_{—}002541530.1, EEQ89262.1, XP_{—}001247332.1, XP_{—}003066043.1, EDP47672.1, XP_{—}002628451.1, XP_{—}001910644.1, EGR44510.1, EFQ36733.1, XP_{—}003052472.1, XP_{—}001393445.2, XP_{—}001522438.1, EGO04179.1, XP_{—}001397944.2, CAK49049.1, EFQ30109.1, XP_{—}001585052.1, EGO30123.1, XP_{—}388496.1, XP_{—}003173913.1, CBF76609.1, XP_{—}003028593.1, EGO04180.1, CAK46976.1, XP_{—}370476.1, XP_{—}002145942.1, XP_{—}003004457.1, ADK36663.1, XP_{—}003040708.1, XP_{—}003351473.1, EFY84692.1, XP_{—}748328.2, XP_{—}003190325.1, XP_{—}002378813.1, EGR46513.1, XP_{—}003033448.1, XP_{—}002145326.1, XP_{—}662462.1, XP_{—}747469.1, XP_{—}001935085.1, EGR45892.1, E0001601.1, EGP89995.1, XP_{—}001222615.1, XP_{—}001224356.1, EGN93507.1, XP_{—}001934479.1, BAK09464.1, EGO30124.1, XP_{—}001267956.1, ADK36661.1, EFY97845.1, XP_{—}001834501.1, EGO03790.1, XP_{—}001884320.1, XP_{—}003028899.1, AAP79879.1, EFY84206.1, BAK09467.1, XP_{—}003030469.1, XP_{—}001412594.1, XP_{—}001834508.1, XP_{—}001839436.2, XP_{—}002583529.1, XP_{—}001886288.1, XP_{—}002843371.1, XP_{—}001587730.1, BAK09418.1, BAK09442.1, EGO28830.1, EGE03365.1, EFZ01428.1, EGO03065.1, XP_{—}001558890.1, XP_{—}002487181.1, EGO29652.1, AAX49400.1, EFY92529.1, XP_{—}002380252.1, XP_{—}001884460.1, BAK09387.1, XP_{—}001839366.2, XP_{—}003031835.1, EFY99978.1, AAL67906.1, BAG09240.1, XP_{—}002381768.1, XP_{—}001800031.1, XP_{—}001825073.2, BAE63940.1, XP_{—}003028894.1, AAL67905.1, XP_{—}002910303.1, EGO22856.1, XP_{—}003028896.1, XP_{—}681680.1, XP_{—}002486603.1, XP_{—}001838945.2, EGR50064.1, XP_{—}001884349.1, XP_{—}001883816.1, CAK37996.1, CAO91865.1, XP_{—}003031227.1, XP_{—}001258702.1, XP_{—}001586739.1, XP_{—}001560806.1, CBF69707.1, ADN43682.1, XP_{—}001593179.1, XP_{—}001886909.1, XP_{—}001934479.1, XP_{—}001587730.1, XP_{—}001886909.1, XP_{—}001831709.2, XP_{—}001392650.1, XP_{—}366716.2, CAL69594.1, XP_{—}001269140.1, XP_{—}002566307.1, XP_{—}001555473.1, XP_{—}663925.1, XP_{—}001598033.1, XP_{—}001835239.2, EGN97256.1, XP_{—}001554305.1, NP_{—}182075.1, XP_{—}001560475.1, EFQ32286.1, XP_{—}001216788.1, XP_{—}002483975.1, AAC31835.1, NP_{—}850427.1, XP_{—}002143660.1, XP_{—}003327130.1, BAJ78287.1, XP_{—}002880182.1, ACB59278.1, EFQ36688.1, BAJ78285.1, BAJ78286.1, XP_{—}001798699.1, EEH44101.1, BAJ78288.1, BAJ78284.1, EGG02425.1, EGG03011.1, AAA34334.1, NP_{—}001189747.1, EGG02601.1, XP_{—}002978645.1, EGG 11203.1, XP_{—}762610.1, XP_{—}762620.1, XP_{—}001545581.1, CAB44684.1, CAN80536.1, AAN05337.1, NP_{—}001049423.1, XP_{—}001791898.1, NP_{—}001031814.1, XP_{—}002279531.1, ABK94777.1, AAZ39646.1, XP_{—}002880183.1, ABC68403.1, XP_{—}002839066.1, EGG03014.1, XP_{—}002320074.1, NP_{—}001182854.1, CBI38795.3, XP_{—}002310605.1, NP_{—}196442.2, XP_{—}002270594.1, ABZ80830.1, XP_{—}002275905.1, CBI38796.3, XP_{—}002476978.1, CAB93726.1, EGG03624.1, EGG06527.1, NP_{—}197710.1, XP_{—}001768338.1, XP_{—}002270673.1, BAJ86572.1, XP_{—}002275806.1, CBI38797.3, XP_{—}002320072.1, CAN60189.1, XP_{—}002986290.1, XP_{—}002465888.1, CAN80040.1, XP_{—}002336104.1, XP_{—}002988354.1, XP_{—}002264277.1, EGD72898.1, XP_{—}002866853.1, EAY95236.1, XP_{—}002979701.1, XP_{—}002988762.1, XP_{—}002304502.1, XP_{—}002873349.1, XP_{—}003192947.1, CAN63571.1, NP_{—}001053615.1, NP_{—}176558.1, EGC49561.1, EGG09027.1, XP_{—}002314581.1, XP_{—}002446966.1, XP_{—}002320802.1, ABC59095.1, XP_{—}003323121.1, XP_{—}002974639.1, XP_{—}002395587.1, XP_{—}002866852.1, XP_{—}002319770.1, NP_{—}001146262.1, NP_{—}001169224.1, AAM65207.1, XP_{—}002529058.1, XP_{—}002886391.1, XP_{—}002320071.1, XP_{—}002446967.1, XP_{—}757870.1, EAY95147.1, XP_{—}002899664.1, EEH05830.1, XP_{—}002874114.1, ADO24345.1, BAJ88802.1, BAA05146.1, XP_{—}002963351.1, EAY88475.1, NP_{—}195658.3, XP_{—}002976944.1, ABC59093.1, XP_{—}002275114.1, XP_{—}003328407.1, CAN75428.1, BAJ86471.1, XP_{—}002981144.1, XP_{—}002277006.1, EAZ26110.1, ACN41008.1, XP_{—}002899542.1, XP_{—}001781614.1, EAY76187.1, BAK06758.1, XP_{—}002511745.1, XP_{—}002982626.1, XP_{—}002963763.1, NP_{—}001065111.1, ABF93892.1, XP_{—}002314117.1, BAK06287.1, XP_{—}001745327.1, NP_{—}001047674.1, XP_{—}002878665.1, XP_{—}002974847.1, NP_{—}179899.1, CAN80156.1, NP_{—}001053543.1, ABC59094.1, XP_{—}002328165.1, XP_{—}002270628.1, XP_{—}002275115.1, XP_{—}002980688.1, XP_{—}002465039.1, AAL91155.1, NP_{—}195910.1, XP_{—}002509820.1, NP_{—}200694.1, CAA62082.1, AAL75903.1, XP_{—}002468241.1, XP_{—}002883546.1, XP_{—}002862636.1, XP_{—}002312905.1, EAY79269.1, AAM12494.1, XP_{—}002875027.1, XP_{—}758010.1, XP_{—}002509524.1, AAP54707.2, XP_{—}002869292.1, NP_{—}001143079.1, ACF82946.1, XP_{—}002270497.1, XP_{—}002979685.1, XP_{—}002465041.1, XP_{—}002533544.1, AAG17470.1, XP_{—}002985393.1, NP_{—}191946.1, XP_{—}002525608.1, AAZ39642.1, XP_{—}002270428.1, XP_{—}002529227.1, CBI24485.3, XP_{—}001763206.1, EGG02922.1, XP_{—}002974848.1, NP_{—}001141467.1, CBI27149.3, NP_{—}001130907.1, XP_{—}002982474.1, NP_{—}001048917.1, XP_{—}002465889.1, ABZ80831.1, XP_{—}002464461.1, EAY88476.1, BAJ90714.1, XP_{—}002893825.1, ACN28568.1, XP_{—}002452782.1, XP_{—}002280004.1, XP_{—}001764611.1, NP_{—}001183394.1, BAJ89570.1, CBI24484.3, BAJ88840.1, ACG38359.1, CAN77648.1, BAJ91452.1, NP_{—}001141345.1, XP_{—}002282185.1, XP_{—}002980994.1, XP_{—}002299820.1, BAJ87982.1, BAJ91842.1, XP_{—}003325270.1, XP_{—}001760399.1, CBI34058.3, ADG34845.1, XP_{—}002523775.1, EEH21852.1, Q50EK3.1, BAK06748.1, XP_{—}002963764.1, ACN34158.1, XP_{—}001764503.1, XP_{—}002311750.1, XP_{—}001782495.1, XP_{—}002988642.1, XP_{—}002465625.1, XP_{—}002892051.1, XP_{—}002279649.1, NP_{—}171666.1, ABK28430.1, BAC42067.1, AED99869.1, NP_{—}174713.1, XP_{—}001781706.1, ABG66204.1, XP_{—}002964775.1, NP_{—}001064901.2, XP_{—}002961706.1, XP_{—}002519477.1, XP_{—}001559854.1, CBH32594.1, BAB92258.1, XP_{—}002264897.1, AAL59025.1, XP_{—}002862576.1, ACL53124.1, XP_{—}002521476.1, NP_{—}200045.1, BAJ89814.1, CBI38794.3, XP_{—}776769.1, NP_{—}001141372.1, EEC74485.1, EAY76557.1, XP_{—}002318861.1, NP_{—}001172660.1, XP_{—}002880978.1, AAO00706.1, BAK07606.1, XP_{—}002979336.1, BAC42841.1, BAF46296.1, XP_{—}002306380.1, XP_{—}002865907.1, ACG34921.1, XP_{—}002876375.1, NP_{—}001056685.1, XP_{—}002264292.1, XP_{—}002893443.1, NP_{—}001066096.1, EEE53477.1, CBH32607.1, EAY94753.1, NP_{—}001130939.1, NP_{—}182121.1, XP_{—}002437749.1, NP_{—}191222.1, XP_{—}002865881.1, XP_{—}569708.1, XP_{—}002279670.1, BAJ94774.1, ABF93894.1, BAD94304.1, ACG33785.1, NP_{—}194944.1, NP_{—}180337.1, AAB63277.1, BAJ85246.1, XP_{—}002456654.1, ACN27732.1, XP_{—}002445325.1, EER40289.1, XP_{—}001838184.2, BAJ85532.1, XP_{—}002866555.1, EAY88477.1, ACG47870.1, XP_{—}002310074.1, XP_{—}002457224.1, EAZ25521.1, BAJ87689.1, NP_{—}001044838.1, XP_{—}002521004.1, XP_{—}002882043.1, XP_{—}002527038.1, XP_{—}002318721.1, XP_{—}002979339.1, NP_{—}176086.1, XP_{—}001560028.1, ABC59092.1, ABF93891.1, ACR38435.1, EAY78983.1, NP_{—}179782.1, CCA21696.1, XP_{—}002334340.1, EFX88387.1, NP_{—}001044554.1, XP_{—}002321857.1, NP_{—}173862.1, NP_{—}195660.1, XP_{—}001554079.1, EAZ13864.1, EEC67630.1, EAY76183.1, AAP54710.2, NP_{—}001065112.2, ACD10924.1, XP_{—}001559275.1, EEC67338.1, XP_{—}002273811.1, ADJ68242.1, NP_{—}001065698.1, CAN66874.1, CAB41474.1, XP_{—}002868908.1, XP_{—}002904660.1, CAR47816.1, NP_{—}189243.1, EAY98229.1, XP_{—}002448320.1, 081117.2, XP_{—}002458797.1, XP_{—}002277129.1, BAJ88829.1, CAN67559.1, BAK08034.1, XP_{—}002894062.1, XP_{—}002894891.1, XP_{—}002279981.1, ABR16451.1, NP_{—}201150.1, AAM60854.1, XP_{—}002521002.1, XP_{—}002521474.1, XP_{—}002875311.1, NP_{—}195661.1, AAP79889.1, NP_{—}175193.1, P98188.1, BAK08270.1, CBI21357.3, XP_{—}002870817.1, XP_{—}002904451.1, ABA95812.1, XP_{—}002998647.1, NP_{—}001066166.2, XP_{—}002894690.1, EFY92064.1, XP_{—}002278009.1, XP_{—}002336002.1, CCA16508.1, XP_{—}002868909.1, EAZ31703.1, C96517, EAY86526.1, XP_{—}002307954.1, XP_{—}002904638.1, XP_{—}002266883.1, XP_{—}002439880.1, XP_{—}002892730.1, ADI52567.1, EGI61791.1, XP_{—}002511196.1, EGG04372.1, XP_{—}002511875.1, ACE75189.1, NP_{—}001055681.1, XP_{—}001589816.1, NP_{—}001170655.1, XP_{—}002300789.1, XP_{—}001934479.1, XP_{—}001587730.1, XP_{—}001554079.1, XP_{—}001559275.1, XP_{—}002868908.1, XP_{—}002998647.1, EFY92064.1, XP_{—}002605799.1, BAC43393.1, ABK28457.1, AAL54887.1, BAC43161.1, XP_{—}002333384.1, ZP_{—}03631129.1, AAL84318.1, BAJ99856.1, XP_{—}002593704.1, YP_{—}001965159.1, XP_{—}002454121.1, EFX88390.1, ABR16969.1, NP_{—}177109.3, XP_{—}002441724.1, NP_{—}001166017.1, BAB92256.1, ACE75340.1, AAZ39645.1, XP_{—}002312417.1, XP_{—}002887239.1, NP_{—}001172609.1, NP_{—}001065766.1, XP_{—}002515053.1, AAL54885.1, ABR16897.1, XP_{—}002878579.1, NP_{—}001140775.1, XP_{—}003275955.1, ZP_{—}08045694.1, BAJ94069.1, XP_{—}001654558.1, XP_{—}002436562.1, EAY88702.1, BAK03685.1, XP_{—}003327629.1, XP_{—}002322606.1, EEH42702.1, XP_{—}002037976.1, NP_{—}172774.1, XP_{—}002282477.1, EFX88388.1, XP_{—}002522465.1, EFZ21470.1, AAO41955.1, AAL54886.1, XP_{—}002450277.1, XP_{—}002862559.1, XP_{—}002335046.1, XP_{—}003328408.1, ACE75187.1, XP_{—}001849294.1, XP_{—}002444132.1, XP_{—}002894061.1, EFN77015.1, EGI69992.1, CBI17962.3, AAL54884.1, XP_{—}002998650.1, XP_{—}002105150.1, XP_{—}002877615.1, EFZ22412.1, XP_{—}002439815.1, XP_{—}002300790.1, CBI40391.3, AEI59774.1, XP_{—}002801151.1, XP_{—}003325267.1, XP_{—}001554577.1, EAY79865.1, XP_{—}002465796.1, XP_{—}002931035.1, ABA91371.1, ACE75338.1, XP_{—}001592850.1, XP_{—}001362981.1, XP_{—}002271246.1, EGB11905.1, NP_{—}176713.1, CBJ27248.1, NP_{—}566155.1, EFX87732.1, EEC71661.1, ACG29046.1, NP_{—}001130576.1, XP_{—}001843663.1, ABK25134.1, EGI65081.1, XP_{—}002722841.1, AAL67908.2, AAO15579.1, YP_{—}122047.1, EFA04617.1, YP_{—}001522424.1, ACB87383.1, NP_{—}001027517.1, EEE52725.1, XP_{—}002078257.1, XP_{—}002722842.1, ZP_{—}05128707.1, XP_{—}003208874.1, AAK31592.1, ABA95747.2, NP_{—}001181472.1, NP_{—}001075572.1, XP_{—}001108915.1, XP_{—}001520882.1, XP_{—}002063219.1, EFZ22408.1, AAL57721.1, EFW47740.1, AAQ20834.1, CAN74644.1, XP_{—}002722849.1, BAC30028.1, CAN75729.1, XP_{—}002115603.1, AAN72309.1, EEC68823.1, CAM18519.1, EAZ13863.1, XP_{—}002906159.1, NP_{—}001003947.1, ZP_{—}01858832.1, XP_{—}002882162.1, XP_{—}002089195.1, XP_{—}002892729.1, CAN68037.1, NP_{—}001130648.1, NP_{—}001166016.1, NP_{—}172773.4, ADJ68241.1, EGI62551.1, EFN63658.1, XP_{—}002300103.1, XP_{—}001658673.1, XP_{—}001367719.1, NP_{—}775146.1, XP_{—}001375048.1, AAH21377.1, NP_{—}727589.1, XP_{—}002271847.1, XP_{—}001809620.1, XP_{—}002897528.1, NP_{—}190421.1, XP_{—}002282468.1, XP_{—}536868.2, EEE58297.1, XP_{—}001992105.1, EAY82190.1, ADD20161.1, XP_{—}001363065.1, EAU77129.3, EAY72807.1, EGG03077.1, NP_{—}001181489.1, NP_{—}001177869.1, XP_{—}001966135.1, BAA99522.1, BAK07250.1, XP_{—}002133118.1, NP_{—}001042228.1, AAL57720.1, XP_{—}002897529.1, AAA35712.1, YP_{—}002275016.1, NP_{—}000770.2, XP_{—}002721578.1, XP_{—}321208.4, AAM09532.1, EFN61085.1, BAK06179.1, EFX88389.1, YP_{—}001602608.1, XP_{—}513140.3, NP_{—}001182438.1, AAD31068.1, NP_{—}001093242.1, XP_{—}001367758.2, EFZ18984.1, YP_{—}691921.1, CAH59968.1, AAS80270.1, CAH59967.1, ACQ99381.2, YP_{—}003810988.1, YP_{—}957888.1, CBW44755.1, ZP_{—}05042596.1, ZP_{—}01913735.1, ZP_{—}05043097.1, ADO00145.1, YP_{—}004494060.1, ZP_{—}08206912.1, BAE78452.1, NP_{—}114222.1, ACZ56357.1, YP_{—}640381.1, ZP_{—}04384919.1, ZP_{—}08025219.1, ZP_{—}07715822.1, ZP_{—}06847816.1, YP_{—}001702784.1, AEK27137.1, ZP_{—}07716433.1, ZP_{—}08199554.1, YP_{—}004495520.1, YP_{—}345718.1, ZP_{—}08022914.1, YP_{—}001851443.1, BAG50428.1, YP_{—}001135848.1, BAF95905.1, YP_{—}345695.1, ACP39691.1, ACP39664.1, ACP39635.1, ACP39633.1, ACP39710.1, ACP39698.1, ACP39711.1, BAE47475.1, BAE47474.1, ABW76858.1, ACO50699.1, ACP39643.1, ACP39639.1, ACP39708.1, ACM68663.1, ACP39642.1, ACP39684.1, ACP39636.1, ZP_{—}05095005.1, ACP39652.1, BAE47473.1, ACM68664.1, ACP39646.1, ACP39680.1, ACP39692.1, ACP39675.1, ACP39632.1, ZP_{—}05129284.1, ACP39706.1, ACP39695.1, ACM68665.1, ACP39654.1, ACP39665.1, ACP39649.1, BAE47472.1, ACM68668.1, ACP39676.1, ACP39648.1, ACP39647.1, ZP_{—}01102434.1, ACM68666.1, ACP39641.1, ACM68669.1, ZP_{—}01625037.1, ACP39690.1, ACP39696.1, ACP39697.1, ACP39707.1, ACP39682.1, ACP39650.1, ACP39638.1, ZP_{—}05126641.1, CAH04396.1, ACP39658.1, ZP_{—}01102687.1, ACJ06772.1, YP_{—}001413041.1, YP_{—}552058.1, ADE05601.1, ADI19685.1, BAE47479.1, ZP_{—}01626700.1, ZP_{—}01618279.1, CAH61448.1, YP_{—}001411305.1, YP_{—}003591161.1, ZP_{—}01615522.1, ACM68667.1, ACP39651.1, ZP_{—}05095535.1, ZP_{—}01618489.1, NP_{—}418882.1, ADI19983.1, ACP39677.1, BAE47476.1, ACP39655.1, ACP39656.1, ADI19696.1, BAE47477.1, YP_{—}001413399.1, YP_{—}459878.1, BAE47480.1, BAE47481.1, ACP39653.1, BAE47478.1, YP_{—}001681656.1, ZP_{—}01618281.1, ZP_{—}01627262.1, YP_{—}001413057.1, YP_{—}760740.1, YP_{—}001242466.1, YP_{—}001203574.1, CAH61454.1, YP_{—}002129656.1, YP_{—}001672075.1, ACP39709.1, YP_{—}001990805.1, NP_{—}946959.1, YP_{—}001203575.1, YP_{—}783213.1, YP_{—}003059227.1, YP_{—}004110202.1, ACP39645.1, YP_{—}487538.1, CAH61451.1, YP_{—}570816.1, YP_{—}534107.1, YP_{—}001413223.1, YP_{—}001242465.1, YP_{—}557448.1, ZP_{—}08631162.1, NP_{—}773883.1, ZP_{—}00997728.1, ACP39683.1, NP_{—}768493.1, NP_{—}773882.1, ZP_{—}08271781.1, CAH61449.1, YP_{—}003883668.1, YP_{—}003332953.1, YP_{—}004535688.1, YP_{—}495502.1, YP_{—}459378.1, ZP_{—}08700267.1, ZP_{—}01863452.1, ZP_{—}06860085.1, BAE47487.1, YP_{—}617903.1, ZP_{—}08207422.1, BAE47486.1, ZP_{—}01041003.1, BAE47484.1, ACR78197.1, CAH61456.1, ZP_{—}01858113.1, ACP39681.1, BAE47485.1, ACP39673.1, BAE47483.1, ACP39669.1, BAE47482.1, ACP39674.1, ACP39704.1, ACP39703.1, YP_{—}497095.1, ACP39672.1, ACP39702.1, ACP39670.1, ACP39666.1, YP_{—}458852.1, ACP39687.1, ACP39688.1, ACP39634.1, ACP39686.1, ACP39660.1, ACP39700.1, YP_{—}001411309.1, ZP_{—}01465241.1, ACP39701.1, ACP39679.1, ACP39657.1, ACP39694.1, ACP39659.1, ACP39671.1, ACP39693.1 and YP_{—}003342921.1,
in particular
AAO73954.1, AAO73953.1, XP_{—}002546279.1, AAA34353.2, P30607.1, XP_{—}002421627.1, XP_{—}718670.1, CAA39366.1, XP_{—}001527524.1, AAO73955.1, AAO73956.1, XP_{—}002546278.1, EEQ43157.1, XP_{—}718669.1, AAA34354.1, P10615.3, XP_{—}002421628.1, 226487, P16141.3, CAA39367.1, Q9Y757.2, XP_{—}001485567.1, AAO73958.1, XP_{—}001383506.2, XP_{—}460111.2, AAO73959.1, Q12586.1, XP_{—}460112.2, AAO73960.1, Q12589.1, AAO73961.1, XP_{—}460110.2, EEQ43763.1, XP_{—}710174.1, EDK41572.2, XP_{—}001482650.1, CAA75058.1, XP_{—}002548818.1, Q12588.1, XP_{—}002422222.1, XP_{—}001383636.2, XP_{—}001525381.1, XP_{—}002548823.1, P30610.1, AAO73952.1, XP_{—}002548428.1, CAA36197.1, XP_{—}002421126.1, AAA34320.1, P16496.3, P30608.1, P24458.1, XP_{—}717999.1, XP_{—}001383817.1, Q9Y758.1, XP_{—}001482092.1, XP_{—}001383710.2, P30609.1, AAB24479.1, XP_{—}457792.1, XP_{—}001524144.1, XP_{—}457727.2, XP_{—}001525578.1, XP_{—}002616743.1, XP_{—}002614836.1, XP_{—}001525577.1, AAO73957.1, Q12585.1, XP_{—}001386440.2, XP_{—}002616857.1, XP_{—}001483276.1, XP_{—}500402.1, EDK39907.2, XP_{—}500560.1, XP_{—}001211376.1, XP_{—}002560027.1, XP_{—}504857.1, XP_{—}500855.1, XP_{—}504406.1, BAA31433.1, XP_{—}500856.1, XP_{—}501148.1, XP_{—}746567.1, XP_{—}001262425.1, XP_{—}001274843.1, XP_{—}002840588.1, XP_{—}002377641.1, XP_{—}001825995.1, XP_{—}001400739.1, XP_{—}718066.1, CAA35593.1, XP_{—}664735.1, XP_{—}002150795.1, XP_{—}500097.1, XP_{—}002483325.1, XP_{—}504311.1, XP_{—}500273.1, XP_{—}002548817.1, EDP54484.1, XP_{—}755288.1, XP_{—}001260447.1, EFY97851.1, ACD75398.1, ADK36660.1, XP_{—}001213081.1, XP_{—}002377989.1, XP_{—}001826299.1, XP_{—}001554811.1, XP_{—}501667.1, XP_{—}002148942.1, ADK36662.1, XP_{—}002565827.1, P30611.1, XP_{—}001267871.1, XP_{—}002372373.1, EFY84686.1, P43083.1, XP_{—}001263094.1, XP_{—}002148355.1, XP_{—}002568429.1, XP_{—}001817314.1, Q12587.1, XP_{—}001396435.1, XP_{—}001938589.1, XP_{—}001388497.2, XP_{—}663661.1, XP_{—}003295335.1, XP_{—}002152088.1, XP_{—}001212071.1, Q12573.1, XP_{—}002379858.1, XP_{—}001821592.1, XP_{—}002844341.1, XP_{—}001394678.1, ACD75400.1, XP_{—}003170343.1, XP_{—}001265480.1, XP_{—}002550661.1, EDP55514.1, XP_{—}001528842.1, XP_{—}749919.1, XP_{—}001593058.1, P30612.1, EGC48494.1, EEH04429.1, XP_{—}001585586.1, XP_{—}003236182.1, XP_{—}001400199.1, EEQ46951.1, XP_{—}721410.1, EGP87864.1, XP_{—}002380808.1, XP_{—}001792771.1, XP_{—}001208515.1, XP_{—}001216161.1, XP_{—}003071804.1, EFW16963.1, XP_{—}002542118.1, XP_{—}001936677.1, EGD95268.1, XP_{—}003015678.1, XP_{—}501748.1, XP_{—}003169562.1, EFY96492.1, XP_{—}682653.1, XP_{—}002421356.1, CAK43439.1, EFY93677.1, XP_{—}747767.1, XP_{—}001244958.1, XP_{—}003019635.1, XP_{—}002847463.1, EGP83273.1, EGR52487.1, XP_{—}002622526.1, XP_{—}002563618.1, CBX99718.1, XP_{—}001552081.1, XP_{—}003066638.1, XP_{—}003176049.1, ACD75402.1, BAA05145.1, XP_{—}002482834.1, XP_{—}001257501.1, XP_{—}001934574.1, XP_{—}001269972.1, XP_{—}001587438.1, XP_{—}001215856.1, XP_{—}002149824.1, XP_{—}001550556.1, XP_{—}003011982.1, XP_{—}001827121.1, XP_{—}003233566.1, XP_{—}003022481.1, EGR47044.1, EFQ34695.1, XP_{—}003170005.1, BAG09241.1, XP_{—}002796370.1, XP_{—}003019300.1, XP_{—}002563873.1, CAK40654.1, EEH19741.1, XP_{—}003012518.1, EGD95716.1, XP_{—}003239409.1, BAJ04363.1, XP_{—}001537012.1, BAE66393.1, EGP85214.1, XP_{—}002487227.1, AAV66104.1, EGE07669.1, XP_{—}362943.2, XP_{—}003016806.1, EFQ27388.1, XP_{—}002384360.1, XP_{—}002836323.1, XP_{—}001274959.1, EFZ03093.1, XP_{—}661521.1, XP_{—}002849803.1, XP_{—}001589398.1, AAR99474.1, XP_{—}003189427.1, XP_{—}001823699.1, XP_{—}364111.1, XP_{—}001262753.1, EFY86805.1, XP_{—}001390153.2, XP_{—}002384738.1, XP_{—}001941811.1, XP_{—}001220831.1, XP_{—}003296981.1, XP_{—}002480829.1, BAD83681.1, XP_{—}001827526.2, XP_{—}369556.1, CAK38224.1, EFQ26532.1, XP_{—}002562328.1, XP_{—}001904540.1, EGO52476.1, XP_{—}002382002.1, XP_{—}001225874.1, XP_{—}958030.2, XP_{—}002540883.1, XP_{—}001908957.1, XP_{—}001559255.1, XP_{—}364102.1, EDP48064.1, XP_{—}365075.1, XP_{—}381460.1, CBX95930.1, XP_{—}003054099.1, XP_{—}361347.2, XP_{—}002846867.1, XP_{—}001214985.1, EFQ35175.1, XP_{—}002479062.1, XP_{—}001908613.1, XP_{—}003345380.1, EGR50567.1, XP_{—}002479350.1, XP_{—}001394417.2, XP_{—}001394159.2, XP_{—}002146776.1, EGP86783.1, EFX02953.1, CAK45889.1, XP_{—}003006887.1, XP_{—}002541427.1, XP_{—}750735.1, XP_{—}001257962.1, EGO51720.1, XP_{—}003005336.1, EGP83197.1, XP_{—}002149832.1, XP_{—}003052680.1, XP_{—}365851.1, XP_{—}001799910.1, XP_{—}003347175.1, XP_{—}002565258.1, EGR48918.1, EGR52524.1, XP_{—}964653.2, XP_{—}002147083.1, XP_{—}002843935.1, EEH19393.1, CAC10088.1, EEH47609.1, EEQ92528.1, XP_{—}001246560.1, XP_{—}002626168.1, XP_{—}003024880.1, XP_{—}003169255.1, XP_{—}003013780.1, XP_{—}003235691.1, XP_{—}746816.1, EGD98483.1, XP_{—}001389925.2, XP_{—}002842817.1, XP_{—}002797278.1, ADK36666.1, XP_{—}003305469.1, XP_{—}001548471.1, XP_{—}001806478.1, EFQ34989.1, XP_{—}001552987.1, CAC24473.1, XP_{—}002541530.1, EEQ89262.1, XP_{—}001247332.1, XP_{—}003066043.1, EDP47672.1, XP_{—}002628451.1, XP_{—}001910644.1, EGR44510.1, EFQ36733.1, XP_{—}003052472.1, XP_{—}001393445.2, XP_{—}001522438.1, XP_{—}001397944.2, CAK49049.1, EFQ30109.1, XP_{—}001585052.1, XP_{—}388496.1, XP_{—}003173913.1, CBF76609.1, CAK46976.1, XP_{—}370476.1, XP_{—}002145942.1, XP_{—}003004457.1, ADK36663.1, XP_{—}003040708.1, XP_{—}003351473.1, EFY84692.1, XP_{—}748328.2, XP_{—}003190325.1, XP_{—}002378813.1, EGR46513.1, XP_{—}002145326.1, XP_{—}662462.1, XP_{—}747469.1, XP_{—}001935085.1, EGR45892.1, EGP89995.1, XP_{—}001222615.1, XP_{—}001224356.1, XP_{—}001934479.1, XP_{—}001267956.1, ADK36661.1, EFY97845.1, EFY84206.1, XP_{—}001412594.1, XP_{—}002583529.1, XP_{—}002843371.1, XP_{—}001587730.1, EGE03365.1, EFZ01428.1, XP_{—}001558890.1, XP_{—}002487181.1, EFY92529.1, XP_{—}002380252.1, EFY99978.1, BAG09240.1, XP_{—}002381768.1, XP_{—}001800031.1, XP_{—}001825073.2, BAE63940.1, XP_{—}681680.1, XP_{—}002486603.1, EGR50064.1, CAK37996.1, CAO91865.1, XP_{—}001258702.1, XP_{—}001586739.1, XP_{—}001560806.1, CBF69707.1, ADN43682.1, XP_{—}001593179.1, XP_{—}001392650.1, XP_{—}366716.2, CAL69594.1, XP_{—}001269140.1, XP_{—}002566307.1, XP_{—}001555473.1, XP_{—}663925.1, XP_{—}001598033.1, XP_{—}001554305.1, XP_{—}001560475.1, EFQ32286.1, XP_{—}001216788.1, XP_{—}002483975.1, XP_{—}002143660.1, EFQ36688.1, XP_{—}001798699.1, EEH44101.1, AAA34334.1, XP_{—}001545581.1, XP_{—}001791898.1, XP_{—}002839066.1, EGC49561.1, EEH05830.1, BAA05146.1, EEH21852.1, XP_{—}001559854.1, EER40289.1, XP_{—}001560028.1, XP_{—}001554079.1, XP_{—}001559275.1, EFY92064.1, XP_{—}001589816.1, EEH42702.1, XP_{—}001554577.1, XP_{—}001592850.1, YP_{—}691921.1, CAH59968.1, AAS80270.1, CAH59967.1, ACQ99381.2, YP_{—}003810988.1, YP_{—}957888.1, CBW44755.1, ZP_{—}05042596.1, ZP_{—}01913735.1, ZP_{—}05043097.1, ADO00145.1, YP_{—}004494060.1, ZP_{—}08206912.1, BAE78452.1, NP_{—}114222.1, ACZ56357.1, YP_{—}640381.1, ZP_{—}04384919.1, ZP_{—}08025219.1, ZP_{—}07715822.1, ZP_{—}06847816.1, YP_{—}001702784.1, AEK27137.1, ZP_{—}07716433.1, ZP_{—}08199554.1, YP_{—}004495520.1, YP_{—}345718.1, ZP_{—}08022914.1, YP_{—}001851443.1, BAG50428.1, YP_{—}001135848.1, BAF95905.1, YP_{—}345695.1, ACP39691.1, ACP39664.1, ACP39635.1, ACP39633.1, ACP39710.1, ACP39698.1, ACP39711.1, BAE47475.1, BAE47474.1, ABW76858.1, ACO50699.1, ACP39643.1, ACP39639.1, ACP39708.1, ACM68663.1, ACP39642.1, ACP39684.1, ACP39636.1, ZP_{—}05095005.1, ACP39652.1, BAE47473.1, ACM68664.1, ACP39646.1, ACP39680.1, ACP39692.1, ACP39675.1, ACP39632.1, ZP_{—}05129284.1, ACP39706.1, ACP39695.1, ACM68665.1, ACP39654.1, ACP39665.1, ACP39649.1, BAE47472.1, ACM68668.1, ACP39676.1, ACP39648.1, ACP39647.1, ZP_{—}01102434.1, ACM68666.1, ACP39641.1, ACM68669.1, ZP_{—}01625037.1, ACP39690.1, ACP39696.1, ACP39697.1, ACP39707.1, ACP39682.1, ACP39650.1, ACP39638.1, ZP_{—}05126641.1, CAH04396.1, ACP39658.1, ZP_{—}01102687.1, ACJ06772.1, YP_{—}001413041.1, YP_{—}552058.1, ADE05601.1, ADI19685.1, BAE47479.1, ZP_{—}01626700.1, ZP_{—}01618279.1, CAH61448.1, YP_{—}001411305.1, YP_{—}003591161.1, ZP_{—}01615522.1, ACM68667.1, ACP39651.1, ZP_{—}05095535.1, ZP_{—}01618489.1, NP_{—}418882.1, ADI19983.1, ACP39677.1, BAE47476.1, ACP39655.1, ACP39656.1, ADI19696.1, BAE47477.1, YP_{—}001413399.1, YP_{—}459878.1, BAE47480.1, BAE47481.1, ACP39653.1, BAE47478.1, YP_{—}001681656.1, ZP_{—}01618281.1, ZP_{—}01627262.1, YP_{—}001413057.1, YP_{—}760740.1, YP_{—}001242466.1, YP_{—}001203574.1, CAH61454.1, YP_{—}002129656.1, YP_{—}001672075.1, ACP39709.1, YP_{—}001990805.1, NP_{—}946959.1, YP_{—}001203575.1, YP_{—}783213.1, YP_{—}003059227.1, YP_{—}004110202.1, ACP39645.1, YP_{—}487538.1, CAH61451.1, YP_{—}570816.1, YP_{—}534107.1, YP_{—}001413223.1, YP_{—}001242465.1, YP_{—}557448.1, ZP_{—}08631162.1, NP_{—}773883.1, ZP_{—}00997728.1
and especially preferably
AAO73954.1, AAO73953.1, XP_{—}002546279.1, AAA34353.2, P30607.1, XP_{—}002421627.1, XP_{—}718670.1, CAA39366.1, AAO73955.1, AAO73956.1, XP_{—}002546278.1, EEQ43157.1, XP_{—}718669.1, AAA34354.1, P10615.3, XP_{—}002421628.1, 226487, P16141.3, CAA39367.1, AAO73958.1, AAO73959.1, Q12586.1, AAO73960.1, Q12589.1, AAO73961.1, EEQ43763.1, XP_{—}710174.1, CAA75058.1, XP_{—}002548818.1, Q12588.1, XP_{—}002422222.1, XP_{—}002548823.1, P30610.1, AAO73952.1, XP_{—}002548428.1, CAA36197.1, XP_{—}002421126.1, AAA34320.1, P16496.3, P30608.1, P24458.1, XP_{—}717999.1, P30609.1, AAB24479.1, AAO73957.1, Q12585.1, XP_{—}718066.1, CAA35593.1, XP_{—}002548817.1, P30611.1, P43083.1, Q12587.1, Q12573.1, XP_{—}002550661.1, P30612.1, EEQ46951.1, XP_{—}721410.1, XP_{—}002421356.1, BAA05145.1, BAG09241.1, CAC24473.1, BAG09240.1, AAA34334.1, BAA05146.1, XP_{—}500402.1, XP_{—}500560.1, XP_{—}504857.1, XP_{—}500855.1, XP_{—}504406.1, BAA31433.1, XP_{—}500856.1, XP_{—}501148.1, XP_{—}500097.1, XP_{—}504311.1, XP_{—}500273.1, XP_{—}501667.1, XP_{—}501748.1, YP_{—}691921.1, CAH59968.1, AAS80270.1, CAH59967.1, ACQ99381.2, YP_{—}003810988.1, YP_{—}957888.1, CBW44755.1, ZP_{—}05042596.1, ZP_{—}01913735.1, ZP_{—}05043097.1, ADQ00145.1, YP_{—}004494060.1, ZP_{—}08206912.1, BAE78452.1, NP_{—}114222.1, ACZ56357.1, YP_{—}640381.1, ZP_{—}04384919.1, ZP_{—}08025219.1, ZP_{—}07715822.1, ZP_{—}06847816.1, YP_{—}001702784.1, AEK27137.1, ZP_{—}07716433.1, ZP_{—}08199554.1, YP_{—}004495520.1, YP_{—}345718.1, ZP_{—}08022914.1, YP_{—}001851443.1, BAG50428.1, YP_{—}001135848.1, BAF95905.1, YP_{—}345695.1, ACP39691.1, ACP39664.1, ACP39635.1, ACP39633.1, ACP39710.1, ACP39698.1, ACP39711.1, BAE47475.1, BAE47474.1, ABW76858.1, ACO50699.1, ACP39643.1, ACP39639.1, ACP39708.1, ACM68663.1, ACP39642.1, ACP39684.1, ACP39636.1, ZP_{—}05095005.1, ACP39652.1, BAE47473.1, ACM68664.1, ACP39646.1, ACP39680.1, ACP39692.1, ACP39675.1, ACP39632.1, ZP_{—}05129284.1, ACP39706.1, ACP39695.1, ACM68665.1, ACP39654.1, ACP39665.1, ACP39649.1, BAE47472.1, ACM68668.1, ACP39676.1, ACP39648.1, ACP39647.1, ZP_{—}01102434.1, ACM68666.1, ACP39641.1, ACM68669.1, ZP_{—}01625037.1, ACP39690.1, ACP39696.1, ACP39697.1, ACP39707.1, ACP39682.1, ACP39650.1 and ACP39638.1
and
proteins with a polypeptide sequence in which up to 60%, preferably up to 25%, especially preferably up to 15%, in particular up to 10, 9, 8, 7, 6, 5, 4, 3, 2, 1% of the amino acid residues are modified in comparison with the abovementioned reference sequences by deletion, insertion, substitution, or a combination thereof and which still have at least 50%, preferably 65%, especially preferably 80%, in particular more than 90%, of the activity of the protein with the corresponding abovementioned reference sequence, where 100% activity of the reference protein is understood as meaning the increase of the activity of the cells used as biocatalyst, that is to say the amount of substance reacted per unit time, based on the cell weight used (units per gram of cell dry weight [U/g CDW]), compared with the activity of the biocatalyst without the presence of the reference protein, where activity in this context and in the context of the determination of the activity of the enzyme E₁ₐ is generally understood in particular as meaning the conversion of lauric acid and/or its methyl ester into ω-hydroxylauric acid and/or its methyl ester.

### Specific Enzymes E_{1b}

[0161] AlkB alkane hydroxylases E_{1b} which are preferred according to the invention are selected from among the list

YP_{—}001185946.1, Q9WWW6.1, YP_{—}957898.1, YP_{—}957728.1, YP_{—}694427.1, BAC98365.1, ZP_{—}00957064.1, CAC86944.1, YP_{—}001672212.1, CAB59525.1, ACH99213.1, ACH99215.1, ACH99216.1, AAK56792.1, ACH99229.1, ACS91348.1, AAP41820.1, ZP_{—}05128075.1, CAM58121.1, CAM58085.1, ACQ44675.1, ACZ62808.1, ZP_{—}01738706.1, ZP_{—}01916228.1, ZP_{—}01225325.1, YP_{—}001023605.1, ACJ22747.1, ACT91140.1, AAT91722.2, CBA27418.1, YP_{—}001889129.1, EGC97932.1, ACT91201.1, ZP_{—}05083049.1, YP_{—}554098.1, ZP_{—}01900149.1, ADG26619.1, ADG26657.1, ADG26640.1, ZP_{—}06838771.1, ADG26649.1, ADG26651.1, ZP_{—}02374120.1, YP_{—}368326.1, ZP_{—}02380481.1, ADG26643.1, ADG26628.1, YP_{—}442346.1, ADG26620.1, ADG26647.1, ZP_{—}07673680.1, ADG26638.1, YP_{—}002232139.1, YP_{—}001118743.1, ZP_{—}01764629.1, YP_{—}108945.1, YP_{—}334185.1, ZP_{—}04897834.1, ZP_{—}02889567.1, YP_{—}620386.1, YP_{—}002897546.1, ZP_{—}02166109.1, ZP_{—}02904755.1, ADG26639.1, YP_{—}001892637.1, ADG26642.1, ZP_{—}04939380.1, ZP_{—}02464124.1, YP_{—}102417.1, CAC36356.1, ACJ22727.1, YP_{—}001764240.1, YP_{—}002765609.1, YP_{—}001945311.1, ZP_{—}03586616.1, ACJ22665.1, ZP_{—}03574223.1, CAC37038.1, ZP_{—}02456517.1, YP_{—}001807560.1, YP_{—}002779449.1, AAK97454.1, YP_{—}002912304.1, ACR55689.1, YP_{—}003397515.1, YP_{—}004361423.1, YP_{—}772734.1, ACJ65014.1, ACT31523.1, ACJ22750.1, ZP_{—}07375042.1, YP_{—}002776786.1, ACB11552.1, ZP_{—}02363472.1, ADG26653.1, ZP_{—}04383196.1, ZP_{—}02356342.1, ACJ22751.1, YP_{—}952571.1, ACU43494.1, YP_{—}001135977.1, YP_{—}002764193.1, YP_{—}003855036.1, YP_{—}004078475.1, AAK97448.1, ZP_{—}04388098.1, ACX30747.1, ADG26632.1, ACJ22719.1, ADO21492.1, ZP_{—}05061580.1, ADR72654.1, ACZ65961.1, ACX30755.1, YP_{—}001849604.1, AAV64895.1, YP_{—}004495037.1, YP_{—}702497.1, YP_{—}001069662.1, ZP_{—}06850622.1, BAF34299.1, CAB51024.2, YP_{—}004008018.1, YP_{—}003768535.1, ACJ65013.1, ZP_{—}07282765.1, YP_{—}886209.1, ACJ22725.1, ZP_{—}08155372.1, YP_{—}004493362.1, ZP_{—}05228000.1, ZP_{—}07717360.1, BAD67020.1, YP_{—}004524245.1, ZP_{—}07715778.1, NP_{—}217769.1, ACS91349.1, YP_{—}960105.1, ZP_{—}07014137.1, YP_{—}004746682.1, ZP_{—}08022271.1, ACN62569.1, ADQ37951.1, YP_{—}003647687.1, YP_{—}003837040.1, ADG26600.1, YP_{—}002768905.1, ZP_{—}08553310.1, ADG26597.1, ACJ22749.1, ADG26598.1, YP_{—}001704327.1, ZP_{—}04385381.1, ZP_{—}04751264.1, ADG26609.1, ADG26610.1, ZP_{—}06417258.1, ADG26607.1, ADP98338.1, YP_{—}003275257.1, YP_{—}004084103.1, ADG26630.1, ADG26625.1, ADG26605.1, ADG26599.1, ZP_{—}05218167.1, ADQ37950.1, YP_{—}921354.1, ADG26645.1, ADG26612.1, YP_{—}004493370.1, YP_{—}638501.1, YP_{—}003809668.1, NP_{—}962298.1, ZP_{—}04750514.1, ADG26608.1, ADT82701.1, ACJ06773.1, YP_{—}120833.1, ADG26618.1, ADG26602.1, ADG26623.1, ZP_{—}04383566.1, ZP_{—}08122407.1, YP_{—}004077166.1, ZP_{—}05041651.1, ZP_{—}04608296.1, ABU93351.2, YP_{—}003658078.1, ADQ37949.1, ADG26652.1, YP_{—}002765850.1, AAK97447.1, CAD24434.1, CAC40954.1, ACT91203.1, YP_{—}120829.1, ZP_{—}07282558.1, YP_{—}003298195.1, YP_{—}001851790.1, ZP_{—}05827357.1, ADG26633.1, CAB51020.1, YP_{—}953908.1, ZP_{—}07990416.1, YP_{—}119532.1, ZP_{—}08442348.1, ZP_{—}08276444.1, ZP_{—}04661203.1, ABO12068.2, YP_{—}001846325.1, ADQ37952.1, ZP_{—}08198697.1, ZP_{—}00996652.1, YP_{—}001707231.1, ZP_{—}08433663.1, ZP_{—}08205256.1, YP_{—}003732372.1, YP_{—}906529.1, ACT91204.1, YP_{—}001506534.1, YP_{—}001713880.1, YP_{—}883357.1, YP_{—}004525252.1, ADG26604.1, YP_{—}001134633.1, ZP_{—}08195602.1, ZP_{—}06690500.1, ZP_{—}05826167.1, ADY81595.1, ZP_{—}06056754.1, AAK31348.1, YP_{—}251715.1, ZP_{—}08461977.1, ZP_{—}05847237.1, YP_{—}712218.1, YP_{—}001084670.1, ZP_{—}04387164.1, YP_{—}260041.1, YP_{—}002873097.1, ADG26614.1, AAK97446.1, YP_{—}001280943.1, ZP_{—}04386125.1, AAC36353.2, CCA29159.1, CAD10804.1, CCA29151.1, CAC40953.1, CCA29161.1, ABA55770.1, AAS93604.4, CCA29173.1, CCA29155.1, CCA29156.1, ABA55772.1, CCA29154.1, ABA55793.1, CCA29162.1, CCA29170.1, ZP_{—}03824539.1, CCA29166.1, CCA29136.1, ZP_{—}06065934.1, ABB54493.1, CCA29169.1, YP_{—}003112137.1, CCA29127.1, CCA29148.1, CCA29160.1, ZP_{—}06057458.1, ABA55773.1, YP_{—}004016090.1, CCA29139.1, YP_{—}480358.1, ABA55787.1, CCA29150.1, CCA29130.1, ZP_{—}07775830.1, ABA55779.1, CCA29132.1, YP_{—}003732938.1, BAB33284.1, CCA29149.1, CCA29145.1, ABA55783.1, CCA29137.1, CCA29129.1, CCA29158.1, CCA29176.1, CCA29142.1, CCA29144.1, BAB33287.1, CCA29133.1, CCA29140.1, CCA29135.1, ZP_{—}06066074.1, ZP_{—}03823182.1, CCA29171.1, CCA29152.1, CCA29131.1, ABA55780.1, CCA29163.1, CCA29143.1, CCA29153.1, YP_{—}001580600.1, CCA29134.1, CCA29138.1, YP_{—}046098.1, ZP_{—}06072466.1, ZP_{—}05361594.1, ACU43504.1, CCA29147.1, CCA29146.1, ZP_{—}06061712.1, ACT91185.1, ACT91147.1, ACT91178.1, ACT91167.1, ACT91181.1, ACT91188.1, ZP_{—}06069784.1, ACT91205.1, ZP_{—}06725872.1, ACT91171.1, CCA29128.1, ABY56787.1, ADE05602.1, ACU43474.1, ACJ22718.1, ABB90688.1, ACU43519.1, ABB96093.1, ACU43485.1, ACU43493.1, ABW76857.1, ACT91163.1, ACJ22673.1, ZP_{—}06188150.1, ACT91242.1, ACT91225.1, ACT91211.1, ACU43479.1, ACU43491.1, ACU43522.1, ACU43486.1, ACT91221.1, ACJ22662.1, ACU43506.1, ACU43487.1, ACT91259.1, AAA97866.1, ACU43502.1, YP_{—}001252544.1, ABB96084.1, ACU43520.1, ACJ22668.1, ACU43503.1, ACT91230.1, ABA55777.1, ACT91231.1, ZP_{—}01748311.1, ACJ22724.1, ACU43475.1, ACU43511.1, ACU43490.1, ZP_{—}08330953.1, ACU43484.1, CBX01596.1, ACT91168.1, YP_{—}096989.1, ACT91215.1, YP_{—}125370.1, ACT91233.1, ACU43478.1, ADE05603.1, ACJ22715.1, ACU43512.1, ACT91196.1, ACJ22692.1, ACU43510.1, ACU43521.1, ACT91174.1, ACT91213.1, ACT91142.1, ACT91206.1, ACT91216.1, ACT91182.1, ACT91255.1, ACT91246.1, ACT91217.1, ACT91155.1, ACT91240.1, ACT91207.1, ACU43495.1, YP_{—}128249.1, ACT91160.1, YP_{—}004052990.1, ACT91226.1, ACU43507.1, ABO61855.1, ACT91214.1, ACT91220.1, YP_{—}001188237.1, ACJ22689.1, ZP_{—}01689499.1, YP_{—}004379711.1, ACJ22748.1, ABB90683.1, ACT91223.1, ACT91235.1, ABO61786.1, ACU43508.1, ACU43492.1, ACT91219.1, ACT91244.1, ABO61856.1, ACT91239.1, ACU43473.1, ABO61850.1, ACT91262.1, ACT91261.1, ACT91224.1, ACU43499.1, ACU43488.1, ADO21767.1, YP_{—}004654946.1, ADO21777.1, ABB96089.1, ABO61852.1, ABO61847.1, ACT91222.1, ADO21764.1, ACU43477.1, ADO21773.1, ABO61787.1, ABB96080.1, ABO61857.1, ACT91228.1, ABB96070.1, ADO21744.1, ACT91245.1, CAG17608.1, ADO21747.1, YP_{—}001349162.1, ABK63807.1, ZP_{—}06879583.1, NP_{—}250216.1, ACT91234.1, ZP_{—}01364874.1, ABO61789.1, ADO21772.1, ACU43516.1, ACU43505.1, ACU43501.1, ACT91236.1, ZP_{—}07792758.1, ACZ64723.1, ADO21743.1, ADO21759.1, ACZ64752.1, ADO21755.1, ACD75517.1, YP_{—}790621.1, ACB11551.1, ADO21748.1, NP_{—}251264.1, ZP_{—}01365940.1, ADO21762.1, ADO21739.1, ACU43496.1, ABO61854.1, ZP_{—}06878434.1, ACU43489.1, ACU43483.1, ADO21746.1, ACT91237.1, ZP_{—}01895378.1, ACT91164.1, ADO21736.1, ACJ22711.1, ACZ64754.1, ZP_{—}05042146.1, ADO21688.1, ADO21648.1, YP_{—}001348003.1, ADP98656.1, ADO21737.1, ADO21760.1, ADO21754.1, ADO21740.1, ACZ64758.1, ACU43497.1, ZP_{—}01912185.1, ABB96111.1, ACU43482.1, ACB11549.1, ADO21775.1, CCA29157.1, ADO21681.1, ADO21668.1, ADO21656.1, ACU43517.1, ACT91165.1, ACJ22695.1, ACJ22688.1, ABB96071.1, ADO21763.1, ACT91241.1, ADO21735.1, ACB11550.1, ADO21778.1, ACT91172.1, ADO21765.1, ABB96087.1, CBJ30233.1, ACJ22752.1, ABB96105.1, ACB15251.1, ACJ22694.1, ACZ64741.1, ACZ64706.1, ABB96108.1, ACT91191.1, ABB96101.1, ABB90691.1, ACZ64745.1, YP_{—}691842.1, ABB96075.1, ABB90682.1, ABB90690.1, ADO21676.1, ADO21679.1, ABO61768.1, YP_{—}435857.1, ACJ22722.1, ACT91238.1, ACZ64725.1, CAC14062.1, ADO21682.1, ACZ64771.1, ACZ64718.1, ACZ64724.1, ADO21670.1, ADO21667.1, CAC37048.1, ACZ64708.1, ABB96092.1, ACJ22687.1, ACZ64703.1, ADO21690.1, ABB92364.1, ACB11547.1, ACZ64720.1, ADO21655.1, ACZ64717.1, ADO21680.1, ACZ64757.1, ACZ64733.1, ACT91144.1, ACU43481.1, ACT91179.1, ZP_{—}02181409.1, ACZ64704.1, ABB96073.1, ACJ22675.1, ACZ64721.1, ABB96090.1, ACJ22729.1, ACU43515.1, ZP_{—}01307000.1, ABB90685.1, YP_{—}003862088.1, ACZ64715.1, ACZ64710.1, ACJ22735.1, ABB90687.1, ADO21661.1, ADO21674.1, ACT91177.1, ABB54492.1, ABB96076.1, ABB92365.1, ACT91194.1, ADO21689.1, ACJ22691.1, ABB90681.1, ADO21649.1, ADO21671.1, ACZ64728.1, ABB96095.1, CAC40945.1, ADO21652.1, ADO21665.1, ADE08461.1, ADO21678.1, ACZ64705.1, ACJ22690.1, ADO21675.1, ADO21685.1, ABB96072.1, ACJ22736.1, ACB11540.1, ABB96091.1, AC 104540.1, ACT91251.1, ACT91146.1, ACT91166.1, ACT91156.1, ADO21752.1, ADO21673.1, ADO21725.1, ABB96104.1, ABB90694.1, ABB90696.1, ACT91173.1, ADO21647.1, ZP_{—}03700804.1, ACT91232.1, ADO21694.1, CAC40949.1, ABB92361.1, ACT91195.1, ACI04538.1, ADO21691.1, ACJ22685.1, ADO21653.1, ABS12461.1, ACZ64736.1, ACZ64772.1, ABB90680.1, ADO21659.1, ACZ64774.1, ADO21684.1, ADO21729.1, ADO21650.1, ADO21733.1, ACZ64755.1, ACZ64751.1, ABA55775.1, ADO21738.1, CCA29174.1, ADO21669.1, ACZ64744.1, ADO21654.1, ADO21768.1, ABB96106.1, CCA29168.1, ACT91176.1, ACB11555.1, ABB90695.1, ADO21660.1, ACJ22666.1, ACZ64778.1, ADO21766.1, ADO21677.1, ZP_{—}02161687.1, CCA29165.1, ADO21745.1, ACB11548.1, ABB90689.1, ABB96107.1, AAT46052.1, ADO21718.1, ADO21722.1, ABB96088.1, EFW40271.1, ADO21686.1, ABB96103.1, ACU43500.1, ACB11536.1, ABB92360.1, CCA29167.1, ACT91199.1, ACZ64770.1, ACJ22716.1, ABA55786.1, ACZ64737.1, ABB96083.1, ACJ22676.1, ACZ64735.1, ACT91212.1, ACJ22765.1, CAJ01371.1, CAC 17734.1, ABD36389.1, ACB11537.1, CAC08515.1, ACZ64714.1, ACU43513.1, ABB96082.1, ADN21387.1, ADO21711.1, ABD36392.1, ABR10770.1, CAC37049.1, ABB96098.1, ABB90692.1, ACB11535.1, ACZ64768.1, ACJ22756.1, ABB96094.1, ABA55791.1, ABB96078.1, ACT91141.1, ACZ64779.1, ACZ64750.1, CAJ01370.1, ACZ64753.1, ACU43480.1, ABA55794.1, ABB96085.1, ABB96110.1, YP_{—}004448035.1, ACZ64709.1, ABB96102.1, ACZ64773.1, CCA29175.1, ACZ64749.1, ACZ64756.1, ACZ64781.1, ABO61777.1, ACZ64759.1, ACZ64764.1, ACZ64740.1, ACT91249.1, ZP_{—}03702922.1, ACB11545.1, ACZ64775.1, ACZ64769.1, ACT91145.1, ACZ64742.1, ACT91254.1, ACZ64762.1, ACZ64716.1, ACZ64777.1, ADM26559.1, ABB96096.1, ACZ64780.1, ZP_{—}01201250.1, CAH55829.1, ZP_{—}01052921.1, ABB96077.1, ADO21658.1, ACT91161.1, ABB90684.1, ACR56750.1, ABB90697.1, ACZ64746.1, ABB92367.1, ACT91139.1, ACZ64763.1, ACT91200.1, ABO61773.1, ABB96081.1, ACZ64748.1, ACZ64782.1, ACU43498.1, ADO21651.1, ABB90679.1, BAG06233.1, ACZ64747.1, ABB96086.1, ACZ64761.1, ABB92370.1, ABO61774.1, ACT91175.1, ABB90686.1, ACB11546.1, ZP_{—}01740604.1, ABO61785.1, YP_{—}001531377.1, XP_{—}001434539.1, ABA55767.1, ABO21865.1, ABF55636.1, ABA55751.1, ABB90698.1, ADD12311.1, ACZ64765.1, ABB92366.1, ABB92368.1, ACI04539.1, XP_{—}001023288.1, ACZ64783.1, ADO21692.1, ZP_{—}01753800.1, ACZ64760.1, ACZ64700.1, ZP_{—}01055480.1, ACZ64767.1, ACZ64701.1, ABA55745.1, ABA55752.1, ACZ64766.1, YP_{—}614640.1, ABA55759.1, ADO21723.1, BAG06232.1, ZP_{—}01002389.1, ABB90693.1, ACT91264.1, ABB92358.1, BAF99026.1, ABR10769.1, ZP_{—}00959618.1, AEA08580.1, ADD22986.1, CAB51023.1, CAC40958.1, ADO21709.1, CAB51025.1, ACI15226.1, ACJ22680.1, ZP_{—}05741459.1, ACT91248.1, ABU48567.1, ABO61792.1, ACJ22754.1, EFN53276.1, AAL87644.1, ACT91209.1, ZP_{—}02147281.1, ACU43518.1, ACZ64776.1, ACB11543.1, ACT91151.1, ACJ22764.1, ACT91159.1, ABA18186.1, AEA08579.1, ADO21770.1, ABF55634.1, CAA27179.1, ABA55741.1, ADO21705.1, ZP_{—}01754375.1, ACB11541.1, ACR56751.1, ACT91250.1, ADO21769.1, ADO21753.1, ABB96097.1, ACT91208.1, ABO21867.1, ADO21757.1, ACB11554.1, ABA55749.1, CAC40951.1, ADO21719.1, ABB96074.1, ZP_{—}00954267.1, ZP_{—}05786269.1, AEH76912.1, ABA55742.1, ABA55748.1, BAG06236.1, ADO21732.1, ABA55750.1, ABA55768.1, ACT31522.1, ZP_{—}05090796.1, ACZ64739.1, YP_{—}915886.1, ADO21731.1, CAC40948.1, XP_{—}001032273.1, AEH76911.1, ABA55743.1, ABO61769.1, ABA55755.1, ZP_{—}05122263.1, ADO21756.1, ABA55744.1, ABA55746.1, ZP_{—}01901011.1, ZP_{—}02150761.1, ADO21742.1, ACR56752.1, ABA55747.1, ABF55637.1, ABA55740.1, ABA55760.1, ZP_{—}00948812.1, ABA55804.1, ADO21771.1, ZP_{—}05342453.1, ABF55638.1, YP_{—}508336.1, ABB92357.1, ZP_{—}01049702.1, ABU48546.1, ABU48555.1, ABA55764.1, ABO21866.1, ZP_{—}05079274.1, ZP_{—}01880441.1, ACZ64738.1, ZP_{—}05842058.1, ACT91218.1, ABA55769.1, ABA55739.1, ABA55803.1, ACT91247.1, ABA55782.1, ACZ17539.1, ABB92359.1, ACH69966.1, ZP_{—}01035050.1, ACZ17537.1, ABA55774.1, ACZ64729.1, ACZ17538.1, ZP_{—}01751972.1, ACZ64731.1, ACZ64702.1, AAR13803.1, AEJ28400.1, ZP_{—}05099213.1, CAB51021.1, ACZ17531.1, AEH76914.1, ZP_{—}05051648.1, ACZ64726.1, ACZ17540.1, ACZ64727.1, ZP_{—}02152773.1, ACT91253.1, ACZ17536.1, XP_{—}001423873.1, ACZ17534.1, YP_{—}168645.1, ACZ17520.1, ABY56786.1, ACB11539.1, ZP_{—}01157350.1, AEH76910.1, ABY56784.1, AAY85982.1, ACT91257.1, ACB11544.1, ACZ17532.1, ZP_{—}01746661.1, ABA55771.1, BAG06235.1, EGR32049.1, YP_{—}001166282.1, ABO61799.1, ABA55757.1, AEH76915.1, ACO59264.1, ABO26125.1, AEA08577.1, ACT91265.1, ABY56785.1, ACZ17528.1, ABO61798.1, ADO21749.1, ACT91263.1, ACT91252.1, ACZ64722.1, ABO61771.1, ACZ17526.1, ABO26123.1, ADO21714.1, ZP_{—}01000906.1, ABO61796.1, ADC29534.1, ACB15250.1, ACD47155.1, ACZ17525.1, ACB11553.1, ABD36391.1, AEH76913.1, ACZ17523.1, ABO61781.1, ACZ17524.1, ZP_{—}01914093.1, ACB11538.1, ZP_{—}01015838.1, ACJ22693.1, ACB15252.1, CAC86945.1, ACO59265.1, ABO61791.1, ACZ17521.1, ABO26124.1, ACZ64732.1, ACU43514.1, ACT91256.1, ACM63043.1, ACS75820.1, ZP_{—}08666479.1, CAH03133.1, BAG06234.1, AEH76916.1, ABO61790.1, ABE72965.1, ACZ64711.1, ACB11542.1, AAY26148.1, ABA55776.1, ACZ17522.1, ACZ64734.1, AEA08578.1, ACZ17530.1, ZP_{—}04062748.1, ACJ22755.1, NP_{—}969039.1, AAY26149.1, ACJ22761.1, ABU48543.1, ZP_{—}08414255.1, AAT91720.1, ZP_{—}01444283.1, ABA55796.1, ABU48542.1, YP_{—}001042010.1, YP_{—}001234392.1, YP_{—}351510.1, ACZ64730.1, ZP_{—}08634611.1, ACZ17529.1, ACJ22667.1, AAT91719.1, YP_{—}004283531.1, ABO61801.1, ACZ17519.1, ABO15266.1, CAB51040.1, ACZ64707.1, ACJ22766.1, ABO26121.1, ZP_{—}01878984.1, CAB51039.1, ABA55795.1, ABO15269.1, ABO15247.1, ACJ22763.1, ABO15251.1, ACZ17527.1, ABO15270.1, ACJ22769.1, ADE06670.1, ZP_{—}05780387.1, ABO61770.1, ACT91258.1, ABO15258.1, ABO15257.1, ABU48545.1, CAC86946.1, ABO15267.1, ZP_{—}01741446.1, ABU48544.1, YP_{—}002296646.1, AEH76917.1, ADC29550.1, YP_{—}002527219.1, ABK88246.1, ADN21388.1, ACT91210.1, ZP_{—}05064795.1, ABJ16487.1, XP_{—}002675644.1, ABJ16489.1, ADA71089.1, ADA71088.1, AAT46053.1, ZP_{—}01744806.1, ZP_{—}01037964.1, ZP_{—}00955262.1, ABJ 16493.1, YP_{—}001840157.1, ZP_{—}00964204.1, ABB40596.1, ACB15249.1, ADD82963.1, YP_{—}004499590.1, ZP_{—}01011524.1, ACJ22758.1, ZP_{—}01748906.1, ACV30052.1, ZP_{—}06191942.1, YP_{—}001188029.1, ACD63080.1, YP_{—}166583.1, AAV41375.1, ZP_{—}00998265.1, ACJ22757.1, ABB13506.2, ABI13999.1, ABI14004.1, ABB13509.1, YP_{—}371980.1, ZP_{—}01755711.1, ZP_{—}05065835.1, ZP_{—}00959368.1, XP_{—}001020063.1, ABJ16481.1, ABI14006.1, ZP_{—}05101918.1, ZP_{—}01913733.1, ABI14001.1, ABM92270.1, ABI14003.1, CAH03132.1, YP_{—}973211.1, ABA55797.1, YP_{—}003578527.1, ABJ16483.1, ABJ16482.1, CBY78068.1, ACT91260.1, YP_{—}509155.1, ABB13508.1, ABJ16485.1, ABO61779.1, ABI14005.1, ACM63042.1, ADC29543.1, ZP_{—}02153440.1, YP_{—}709335.1, ABI13998.1, ABI14002.1, AAB70825.1, ACX30751.1, ABI14000.1, YP_{—}003617173.1, ZP_{—}01155421.1, ACX30752.1, NP_{—}542887.1, ADC29546.1, AAC38359.1, ADC29541.1, XP_{—}001020064.1, ZP_{—}01442436.1, ZP_{—}05103090.1, ADC29544.1, ABO61809.1, AAY89939.1, ACH99235.1, CAH55830.1, ABO26095.1, YP_{—}004011670.1, ABO26084.1, ADA71083.1, ABO26087.1, ABO61806.1, ADC29531.1, ABO26109.1, ACJ22753.1, ABO26089.1, ABO26093.1, ABO26092.1, ABO61827.1, ABO26105.1, ABO26112.1, AAT91721.1, ABO26120.1, ABO26090.1, ABO26088.1, ABO61811.1, ABO61783.1, CAH55827.1, ACH99232.1, ABO61828.1, ADC29530.1, ACH99234.1, AAQ88276.1, CAH55823.1, ABO26103.1, ACH99233.1, ABO61836.1, ABO26094.1, ABO61840.1, YP_{—}004534277.1, ZP_{—}05845010.1, ABO61821.1, ACH99231.1, AAV68403.1, ABO61839.1, CAH56098.1, ABO26085.1, ABO61826.1, ABO61822.1, ABO26110.1, ABO61810.1, ABO61844.1, ABO61825.1, ABO26099.1, ACJ22767.1, ABO26102.1, YP_{—}004535707.1, ACJ22762.1, ABO26097.1, BAC65444.1, ABO61829.1, YP_{—}114083.1, CAH55828.1, ABO26106.1, YP_{—}552229.1, NP_{—}049190.1, ABO26116.1, CAH56107.1, CAM32407.1, ABO26101.1, ABO61841.1, ABM79805.1, ZP_{—}05075249.1, AAC27438.2, YP_{—}003754872.1, ADC29532.1, ADA71139.1, ADA71107.1, ADA71095.1, YP_{—}001268217.1, ADA71126.1, ADA71094.1, CAH56108.1, ADC29533.1, ADA71085.1, ZP_{—}05054453.1, ADA71097.1, ADA71086.1, ADA71114.1, ADC29548.1, ADA71101.1, ADC29547.1, ADA71138.1, ADC29542.1, ADA71098.1, ADA71128.1, ADA71105.1, ADA71093.1, ADA71135.1, ADA71100.1, YP_{—}557479.1, ADA71113.1, ADA71091.1, ADC29537.1, ADA71084.1, ADA71090.1, CAH56094.1, XP_{—}002945767.1, ADA71137.1, ADA71103.1, ADA71118.1, ADA71133.1, ADA71102.1, ADC29536.1, CAH56100.1, CAH56101.1, ACI15225.1, ACI15225.1, ABO26091.1, CAH55826.1, CAH55824.1, ZP_{—}08484419.1, ADA71111.1, ACJ22759.1, CAH55825.1, CAH56106.1, CAH56099.1, CAC40957.1, ZP_{—}05075037.1, CAH56102.1, ZP_{—}06846296.1, ABJ16491.1, ZP_{—}05067177.1, XP_{—}001698107.1, BAH10789.1, BAH10791.1, BAH10793.1, BAH10788.1, ABJ16490.1, BAH10800.1, BAH10790.1, BAH10792.1, ZP_{—}05075214.1, BAH10799.1, BAH10795.1, BAH10787.1, BAH10798.1, BAH10794.1, BAH10801.1, BAH10796.1, BAH10797.1, BAH10802.1, CAH56095.1, CAH56096.1, ADC29538.1, ABX76425.1, ZP_{—}06727686.1, ZP_{—}07774883.1, YP_{—}001615042.1,
in particular YP_{—}001185946.1, Q9WWW6.1, YP_{—}957898.1, YP_{—}957728.1, YP_{—}694427.1, BAC98365.1, ZP_{—}00957064.1, CAC86944.1, YP_{—}001672212.1, CAB59525.1, ACH99213.1, ACH99215.1, ACH99216.1, AAK56792.1, ACH99229.1, ACS91348.1, AAP41820.1
and especially preferably YP_{—}001185946.1,
and
proteins with a polypeptide sequence in which up to 60%, preferably up to 25%, especially preferably up to 15%, in particular up to 10, 9, 8, 7, 6, 5, 4, 3, 2, 1% of the amino acid residues are modified in comparison with the abovementioned reference sequences by deletion, insertion, substitution, or a combination thereof and which still have at least 50%, preferably 65%, especially preferably 80%, in particular more than 90%, of the activity of the protein with the corresponding abovementioned reference sequence, where 100% activity of the reference protein is understood as meaning the increase of the activity of the cells used as biocatalyst, that is to say the amount of substance reacted per unit time, based on the cell weight used (units per gram of cell dry weight [U/g CDW]), compared with the activity of the biocatalyst without the presence of the reference protein, where activity in this context and in the context of the determination of the activity of the enzyme E_{1b} is generally understood in particular as meaning the conversion of lauric acid and/or its methyl ester into w-hydroxylauric acid and/or its methyl ester.

### Specific Enzymes E_{c1}

[0162] Eukaryotic fatty alcohol oxidases E_{1c} which are preferred in this context are selected from among the list

AAS46878.1, ACX81419.1, AAS46879.1, CAB75353.1, AAS46880.1, XP_{—}712350.1, XP_{—}002422236.1, XP_{—}712386.1, EEQ43775.1, XP_{—}001525361.1, XP_{—}001386087.1, XP_{—}459506.2, CAB75351.1, CAB75352.1, XP_{—}001385255.2, EDK39369.2, XP_{—}001484086.1, XP_{—}002618046.1, XP_{—}002548766.1, XP_{—}002548765.1, XP_{—}003041566.1, XP_{—}003328562.1, XP_{—}001214264.1, XP_{—}001904377.1, XP_{—}658227.1, XP_{—}001591990.1, XP_{—}753079.1, XP_{—}002569337.1, XP_{—}001268562.1, XP_{—}003348911.1, EGP90120.1, XP_{—}001389382.1, EER37923.1, XP_{—}001264046.1, EGO58212.1, XP_{—}001554225.1, XP_{—}003298648.1, XP_{—}959005.1, XP_{—}002841296.1, XP_{—}001940486.1, EGR52262.1, EEQ89581.1, EGD99881.1, EFQ33355.1, XP_{—}001821106.1, XP_{—}002622231.1, EGG03784.1, EGC44059.1, XP_{—}003018036.1, XP_{—}003011696.1, EFY90752.1, XP_{—}001227812.1, XP_{—}758170.1, XP_{—}001243546.1, XP_{—}002479333.1, XP_{—}003344707.1, EFW 14100.1, XP_{—}003071927.1, XP_{—}003171263.1, XP_{—}003051757.1, XP_{—}002147053.1, EEH19591.1, EEH50473.1, XP_{—}001792978.1, XP_{—}387094.1, EFY98644.1, XP_{—}002788971.1, XP_{—}002842592.1, EFX04185.1, XP_{—}003231449.1, XP_{—}001729067.1, CBX94189.1, XP_{—}001413535.1, ACF22878.1, B5WWZ9.1, XP_{—}002994642.1, XP_{—}002269629.1, XP_{—}002519938.1, XP_{—}002982582.1, NP_{—}001047464.1, EEC73620.1, XP_{—}002981110.1, XP_{—}002960521.1, NP_{—}566729.1, XP_{—}001541970.1, XP_{—}002967201.1, BAK00483.1, XP_{—}002182547.1, BAK02336.1, XP_{—}002454190.1, XP_{—}002328753.1, XP_{—}002867943.1, XP_{—}002285334.1, CAC87643.1, CAN71289.1, XP_{—}002454188.1, AAL31049.1, XP_{—}002464494.1, AAL31021.1, YP_{—}117187.1, XP_{—}002543430.1, CAA18625.1, XP_{—}002883430.1, NP_{—}193673.2, XP_{—}002529832.1, XP_{—}001753124.1, NP_{—}001142399.1, ACN27562.1, XP_{—}002464495.1, ACR36691.1, BAJ86655.1, B5WWZ8.1, NP_{—}001148058.1, ABR17814.1, EAY78905.1, NP_{—}194586.1, AAM63097.1, AAK64154.1, NP_{—}001064839.2, XP_{—}002869492.1, XP_{—}002314488.1, AAL31024.1, ZP_{—}06967355.1, AAP54248.2, XP_{—}002311685.1, ACF87929.1, YP_{—}907078.1, EGE07035.1, YP_{—}001849908.1, XP_{—}002464496.1, EEC67160.1, AAL31027.1, XP_{—}001761391.1, XP_{—}002961172.1, XP_{—}002528823.1, XP_{—}002966834.1, NP_{—}001176205.1, XP_{—}001763007.1, XP_{—}002272123.1, XP_{—}002889487.1, XP_{—}003003157.1, NP_{—}285451.1, EGG23219.1, NP_{—}171895.2, YP_{—}003395677.1, Q9ZWB9.1, ACF88407.1, ZP_{—}06413771.1, EEE51131.1, YP_{—}003835264.1, YP_{—}003397164.1, YP_{—}004081922.1, XP_{—}003294587.1, EEE51130.1, YP_{—}003647529.1, YP_{—}003647985.1, CBI29206.3, XP_{—}629786.1, ZP_{—}07964664.1, EEE57396.1, EEH09589.1, YP_{—}003265796.1, YP_{—}001840752.1, ZP_{—}08620775.1, ACR36076.1, ZP_{—}05043749.1, YP_{—}980677.1, ZP_{—}05043728.1, YP_{—}692894.1, NP_{—}710223.1, EEC67159.1, AAP03110.1, EFA85697.1, YP_{—}691805.1, YP_{—}551012.1, YP_{—}001174466.1, YP_{—}002796294.1, YP_{—}004716331.1, YP_{—}001019547.1, YP_{—}585737.1, AEA86007.1, YP_{—}960830.1, YP_{—}004743970.1, ZP_{—}03431349.1, ZP_{—}06448642.1, ZP_{—}07430351.1, NP_{—}215006.2, ZP_{—}03535393.1, ZP_{—}06801690.1, YP_{—}001849132.1, NP_{—}854165.1, ZP_{—}03427234.1, CBJ27378.1, NP_{—}334920.1, ZP_{—}08571383.1, YP_{—}728161.1, ZP_{—}01896040.1, ZP_{—}03530923.1, YP_{—}551306.1, YP_{—}003167456.1, YP_{—}606070.1, ZP_{—}06850167.1, ADP99095.1, YP_{—}907986.1, ZP_{—}04924166.1, ZP_{—}08139923.1, YP_{—}001270300.1, YP_{—}521830.1, YP_{—}003147410.1, YP_{—}002007173.1, ADR62464.1, YP_{—}004382294.1, NP_{—}747223.1, YP_{—}004687462.1, NP_{—}902159.1, ZP_{—}04936784.1, YP_{—}003914667.1, ZP_{—}01306356.1, ZP_{—}04750553.1, YP_{—}002875279.1, YP_{—}004704374.1, YP_{—}001671392.1, NP_{—}249055.1, ZP_{—}06876360.1, YP_{—}001345853.1, YP_{—}002437969.1, YP_{—}004356853.1, YP_{—}351075.1, CBI23676.3, YP_{—}001189668.1, YP_{—}001528881.1, YP_{—}001613612.1, YP_{—}001747218.1, YP_{—}003393002.1, YP_{—}001365074.1, ZP_{—}07778129.1, ZP_{—}07392715.1, YP_{—}001553329.1, YP_{—}262925.1, YP_{—}751961.1, YP_{—}564183.1, YP_{—}003811876.1, YP_{—}002356821.1, YP_{—}001051828.1, YP_{—}001837525.1, NP_{—}716513.1, ZP_{—}01915079.1, ZP_{—}02156621.1, YP_{—}001184631.1, YP_{—}001475595.1, ZP_{—}05042393.1, YP_{—}962228.1, YP_{—}001612275.1, ADV55625.1, YP_{—}001675797.1, YP_{—}003555260.1, ZP_{—}01075039.1, YP_{—}003812822.1, YP_{—}001503351.1, EFN52938.1, YP_{—}001759063.1, ZP_{—}06503577.1, YP_{—}871025.1, ZP_{—}08564919.1, YP_{—}002310162.1, YP_{—}732875.1, YP_{—}001092722.1, YP_{—}739324.1, XP_{—}002333995.1, NP_{—}085596.1, YP_{—}928870.1, EGD05748.1, NP_{—}443993.1, ZP_{—}08138057.1, ZP_{—}05041587.1, ZP_{—}07011380.1, YP_{—}001612684.1, ZP_{—}07669342.1, ZP_{—}06508361.1, ZP_{—}03423639.1, YP_{—}923293.1, ZP_{—}05061865.1, ZP_{—}08181496.1, YP_{—}559605.1, ZP_{—}06841320.1, ZP_{—}01620712.1, YP_{—}001896340.1, ZP_{—}03276650.1, YP_{—}004303194.1, ZP_{—}08180715.1, ZP_{—}06382740.1, ZP_{—}01034555.1, YP_{—}004604560.1, YP_{—}001020142.1, YP_{—}935375.1, ZP_{—}01546137.1, ZP_{—}07661079.1, YP_{—}001860640.1, ZP_{—}06052841.1, ZP_{—}01881170.1, ZP_{—}05781455.1, YP_{—}932732.1, ZP_{—}08119300.1, YP_{—}004715268.1, ZP_{—}03697402.1, YP_{—}004126957.1, ZP_{—}06703136.1, NP_{—}642445.1, ZP_{—}08273900.1, YP_{—}004524313.1, ZP_{—}01902993.1, YP_{—}001900094.1, AEA84888.1, YP_{—}004690289.1, NP_{—}714358.1, YP_{—}682471.1, YP_{—}003239.1, YP_{—}997465.1, YP_{—}003452130.1, ZP_{—}01739153.1, YP_{—}004219483.1, YP_{—}001761298.1, ZP_{—}01438251.1, CBI37146.3, ZP_{—}04748383.1, YP_{—}004362245.1, ZP_{—}05912795.1, YP_{—}003390234.1, YP_{—}003122799.1, CCB77579.1, EGB06416.1, ZP_{—}08389346.1, YP_{—}191496.1, ZP_{—}05224727.1, ZP_{—}01125614.1, YP_{—}466287.1, YP_{—}001368620.1, YP_{—}001380256.1, YP_{—}002361951.1, YP_{—}002756103.1, YP_{—}001801399.1, ZP_{—}06847140.1, YP_{—}003200069.1, YP_{—}001940247.1, YP_{—}001584322.1, ZP_{—}04679227.1, YP_{—}002493674.1, YP_{—}002135530.1, YP_{—}004290424.1, YP_{—}001772011.1, ZP_{—}08189046.1, ZP_{—}03423640.1, YP_{—}001834251.1, ZP_{—}01041752.1, YP_{—}001533410.1, YP_{—}269751.1, YP_{—}002432994.1, YP_{—}003694653.1, CAD47896.1, NP_{—}769359.1, YP_{—}004239460.1, YP_{—}004605221.1, YP_{—}001961214.1, YP_{—}001837513.1, YP_{—}004335962.1, YP_{—}004358600.1, ZP_{—}05050026.1, YP_{—}003202983.1, BAD03777.1, ZP_{—}02165013.1, NP_{—}774131.1, YP_{—}432169.1, ZP_{—}05000547.1, YP_{—}001261233.1, XP_{—}002593969.1, XP_{—}002603265.1, YP_{—}003342435.1, ZP_{—}01253183.1, EGO36831.1, YP_{—}001866737.1, YP_{—}001523879.1, YP_{—}133594.1, YP_{—}003768990.1, YP_{—}001237820.1, YP_{—}003133224.1, ZP_{—}01896771.1, ZP_{—}01865125.1, NP_{—}960319.1, YP_{—}826958.1, YP_{—}003326608.1, YP_{—}002219515.1, NP_{—}217926.1, ZP_{—}07441899.2, YP_{—}001208178.1, ADM42038.1, YP_{—}002433510.1, ZP_{—}08274313.1, EGO38668.1, ZP_{—}03393221.1, NP_{—}356358.1, ZP_{—}06055780.1, YP_{—}001684562.1, ZP_{—}08528157.1, BAD03162.1, YP_{—}001800712.1, ACL37106.1, YP_{—}883489.1, ZP_{—}01075202.1, NP_{—}969446.1, ZP_{—}01129577.1, YP_{—}001530285.1, ZP_{—}04746501.1, YP_{—}001341980.1, YP_{—}905003.1, ZP_{—}05218299.1, ZP_{—}08665577.1,
preferably
AAS46878.1, ACX81419.1, AAS46879.1, CAB75353.1, AAS46880.1, XP_{—}712350.1, XP_{—}002422236.1, XP_{—}712386.1, EEQ43775.1, XP_{—}001525361.1, XP_{—}001386087.1, XP_{—}459506.2, CAB75351.1, CAB75352.1, XP_{—}001385255.2, EDK39369.2, XP_{—}001484086.1, XP_{—}002618046.1, XP_{—}002548766.1, XP_{—}002548765.1, XP_{—}003041566.1, XP_{—}001214264.1, XP_{—}001904377.1, XP_{—}658227.1, XP_{—}001591990.1, XP_{—}753079.1, XP_{—}002569337.1, XP_{—}001268562.1, XP_{—}003348911.1, EGP90120.1, XP_{—}001389382.1, EER37923.1, XP_{—}001264046.1, EGO58212.1, XP_{—}001554225.1, XP_{—}003298648.1, XP_{—}959005.1, XP_{—}002841296.1, XP_{—}001940486.1, EGR52262.1, EEQ89581.1, EGD99881.1, EFQ33355.1, XP_{—}001821106.1, XP_{—}002622231.1, EGC44059.1, XP_{—}003018036.1, XP_{—}003011696.1, EFY90752.1, XP_{—}001227812.1, XP_{—}001243546.1, XP_{—}002479333.1, XP_{—}003344707.1, EFW14100.1, XP_{—}003071927.1, XP_{—}003171263.1, XP_{—}003051757.1, XP_{—}002147053.1, EEH19591.1, EEH50473.1, XP_{—}001792978.1, XP_{—}387094.1, EFY98644.1, XP_{—}002788971.1, XP_{—}002842592.1, EFX04185.1, XP_{—}003231449.1, CBX94189.1, XP_{—}001413535.1, XP_{—}001541970.1, XP_{—}002543430.1, EGE07035.1, XP_{—}003003157.1
and especially preferably

### AAS46878.1, ACX81419.1, AAS46879.1, CAB75353.1, AAS46880.1, XP_{—}712350.1, XP_{—}002422236.1, XP_{—}712386.1, EEQ43775.1, CAB75351.1, CAB75352.1, XP_{—}002548766.1, XP_{—}002548765.1,

[0163] and
proteins with a polypeptide sequence in which up to 60%, preferably up to 25%, especially preferably up to 15%, in particular up to 10, 9, 8, 7, 6, 5, 4, 3, 2, 1% of the amino acid residues are modified in comparison with the abovementioned reference sequences by deletion, insertion, substitution, or a combination thereof and which still have at least 50%, preferably 65%, especially preferably 80%, in particular more than 90%, of the activity of the protein with the corresponding abovementioned reference sequence, where 100% activity of the reference protein is understood as meaning the increase of the activity of the cells used as biocatalyst, that is to say the amount of substance reacted per unit time, based on the cell weight used (units per gram of cell dry weight [U/g CDW]), compared with the activity of the biocatalyst without the presence of the reference protein, where activity in this context and in the context of the determination of the activity of the enzyme E_{1c} is generally understood in particular as meaning the conversion of dodecan-1-ol into dodecan-1-al or dodecan-1-al into dodecanoic acid.

### Specific Enzymes E_{1d}

[0164] Such preferred AlkJ alcohol dehydrogenases are selected from among

Q00593.1, Q9WWW2.1, ZP_{—}00957061.1, YP_{—}957894.1, CAC38030.1, YP_{—}694430.1, YP_{—}957725.1, YP_{—}001672216.1, YP_{—}552061.1, YP_{—}130410.1, ZP_{—}06155535.1, ZP_{—}01222730.1, YP_{—}691907.1, YP_{—}002297804.1, YP_{—}004283522.1, YP_{—}001234383.1, YP_{—}004435031.1, ZP_{—}05110316.1, ZP_{—}05042898.1, YP_{—}004466324.1, ZP_{—}08553549.1, YP_{—}004125220.1, ADI22536.1, ADI18461.1, YP_{—}003810975.1, YP_{—}662346.1, YP_{—}004427557.1, YP_{—}692606.1, ZP_{—}05043291.1, YP_{—}440752.1, ZP_{—}02386160.1, ZP_{—}04763547.1, ZP_{—}02361232.1, YP_{—}003376674.1, ZP_{—}02354055.1, ZP_{—}05085930.1, ADQ00130.1, YP_{—}003643016.1, ZP_{—}05040520.1, YP_{—}691922.1, AAX23098.1, BAD07371.1, NP_{—}104379.1, YP_{—}002551960.1, YP_{—}003908558.1, YP_{—}987903.1, ZP_{—}05785860.1, YP_{—}004145612.1, YP_{—}004140926.1, CAZ88300.1, ZP_{—}05041901.1, YP_{—}533645.1, ZP_{—}01754259.1, CBA31223.1, YP_{—}587542.1, YP_{—}106852.1, ZP_{—}08402506.1, ZP_{—}05055020.1, ZP_{—}02400829.1, YP_{—}104747.1, ZP_{—}02409412.1, YP_{—}001057269.1, YP_{—}004229837.1, YP_{—}294429.1, YP_{—}001028112.1, ZP_{—}02479747.1, YP_{—}002874799.1, ZP_{—}03541051.1, YP_{—}003606536.1, ZP_{—}02887167.1, YP_{—}001795572.1, YP_{—}487451.1, ACZ62814.1, YP_{—}560809.1, ZP_{—}02167462.1, YP_{—}004482869.1, YP_{—}001581248.1, ZP_{—}07374066.1, YP_{—}001203981.1, ZP_{—}06840259.1, ZP_{—}01915145.1, NP_{—}774525.1, ZP_{—}03561080.1, YP_{—}001208258.1, YP_{—}001897374.1, YP_{—}001413909.1, YP_{—}366469.1, YP_{—}521854.1, YP_{—}004490642.1, YP_{—}003280349.1, ZP_{—}03588744.1, YP_{—}001562229.1, YP_{—}001120981.1, ZP_{—}03574970.1, YP_{—}004234225.1, ZP_{—}02377531.1, ZP_{—}02149954.1, YP_{—}001237360.1, ZP_{—}03266156.1, YP_{—}782821.1, YP_{—}004754039.1, BAB61732.1, ZP_{—}07046388.1, ZP_{—}02145452.1, BAF45123.1, YP_{—}002129953.1, YP_{—}003812439.1, ZP_{—}01055291.1, BAF45124.1, EGH71399.1, ZP_{—}05060389.1, ZP_{—}05090872.1, BAF45126.1, BAB07804.1, ZP_{—}06053464.1, YP_{—}001238278.1, ZP_{—}04944469.1, YP_{—}001171160.1, YP_{—}002984373.1, YP_{—}002237649.1, ZP_{—}08276443.1, BAF98451.1, ZP_{—}05124197.1, YP_{—}568640.1, ZP_{—}05785341.1, NP_{—}769037.1, YP_{—}370657.1, YP_{—}775005.1, ZP_{—}02911119.1, YP_{—}165460.1, ZP_{—}02891796.1, YP_{—}622328.1, ZP_{—}07675057.1, YP_{—}001901188.1, YP_{—}003592183.1, ZP_{—}02361040.1, NP_{—}518244.1, YP_{—}001809673.1, NP_{—}947032.1, YP_{—}001766369.1, YP_{—}002255997.1, ZP_{—}04940241.1, YP_{—}004012032.1, YP_{—}841049.1, YP_{—}002983249.1, YP_{—}003643276.1, YP_{—}003855487.1, YP_{—}003778137.1, ZP_{—}02361104.1, CBA30511.1, ZP_{—}05781295.1, YP_{—}756865.1, ZP_{—}02461782.1, YP_{—}002007988.1, YP_{—}004110133.1, YP_{—}002229680.1, ZP_{—}02386040.1, YP_{—}004684069.1, YP_{—}373268.1, YP_{—}440614.1, NP 421441.1, YP_{—}264896.1, YP_{—}004362617.1, ZP_{—}06053847.1, YP_{—}366538.1, YP_{—}003812285.1, YP_{—}004154520.1, ZP_{—}01901081.1, ZP_{—}02372179.1, ZP_{—}02453559.1, ADP98564.1, YP_{—}003747084.1, ZP_{—}02487888.1, ZP_{—}01768075.1, ZP_{—}02400664.1, YP_{—}106680.1, YP_{—}724753.1, YP_{—}002907583.1, YP_{—}004482470.1, YP_{—}167582.1, YP_{—}270109.1, YP_{—}004362333.1, ZP_{—}02504034.1, YP_{—}003189363.1, YP_{—}973212.1, ZP_{—}00952746.1, YP_{—}459665.1, YP_{—}777218.1, YP_{—}581107.1, ZP_{—}01878091.1, ZP_{—}01057973.1, YP_{—}002913124.1, ZP_{—}01035570.1, YP_{—}001777560.1, YP_{—}552627.1, ZP_{—}02890876.1, YP_{—}587146.1, YP_{—}004141814.1, YP_{—}001685369.1, ZP_{—}05343380.1, NP_{—}886000.1, ZP_{—}04942359.1, ZP_{—}01913732.1, ZP_{—}08244266.1, YP_{—}002233254.1, ZP_{—}01816670.1, YP_{—}837233.1, ZP_{—}07478008.1, ZP_{—}01985205.1, ZP_{—}07473972.1, ZP_{—}01067090.1, ZP_{—}01867788.1, ZP_{—}01754024.1, EGM19144.1, ZP_{—}07741283.1, ZP_{—}06876839.1, YP_{—}002395287.1, ZP_{—}07795498.1, NP_{—}102692.1, NP_{—}252789.1, YP_{—}004451100.1, ZP_{—}01305514.1, YP_{—}002438481.1, ZP_{—}04930310.1, YP_{—}001810189.1, YP_{—}104187.1, ZP_{—}01367534.1, YP_{—}001346382.1, ZP_{—}01878466.1, YP_{—}789017.1, YP_{—}001115422.1, ZP_{—}05067451.1, ZP_{—}05842072.1, YP_{—}001682976.1, YP_{—}761348.1, YP_{—}004611600.1, YP_{—}004188241.1, NP_{—}419761.1, EFV85163.1, YP_{—}684227.1, ZP_{—}06177455.1, NP_{—}935088.1, YP_{—}004614491.1, ZP_{—}08697916.1, YP_{—}004689366.1, ZP_{—}05052326.1, YP_{—}267420.1, YP_{—}728575.1, YP_{—}001759584.1, YP_{—}557446.1, ZP_{—}06844897.1, ZP_{—}06079799.1, YP_{—}003771143.1, ZP_{—}05094472.1, YP_{—}511622.1, ACF98205.1, YP_{—}582314.1, ZP_{—}07660450.1, YP_{—}004065269.1, YP_{—}003979606.1, YP_{—}002520401.1, YP_{—}003579281.1, ZP_{—}01749397.1, ZP_{—}03265018.1, ZP_{—}07283393.1, YP_{—}001532150.1, YP_{—}298941.1, ZP_{—}06688181.1, ZP_{—}01611660.1, ZP_{—}02367747.1, EGP42870.1, ZP_{—}00993245.1, ABY65992.1, YP_{—}354800.1, ZP_{—}01747277.1, YP_{—}561728.1, ZP_{—}02190947.1, YP_{—}605824.1, YP_{—}001991873.1, ZP_{—}00955792.1, YP_{—}003594401.1, YP_{—}004156101.1, YP_{—}001472858.1, YP_{—}001746950.1, ZP_{—}08410042.1, ZP_{—}01116604.1, ADP99912.1, ZP_{—}01692203.1, YP_{—}001328534.1, YP_{—}999236.1, YP_{—}002278452.1, ZP_{—}01306234.1, YP_{—}002871776.1, ZP_{—}02369920.1, ZP_{—}01896942.1, YP_{—}002289724.1, AEG07584.1, YP_{—}999005.1, YP_{—}003552461.1, YP_{—}270668.1, ZP_{—}06862917.1, YP_{—}001811327.1, YP_{—}001166036.1, ABW06653.1, ZP_{—}01548976.1, ZP_{—}07774606.1, ZP_{—}05888080.1, YP_{—}003301477.1, YP_{—}341748.1, ZP_{—}05100248.1, YP_{—}918038.1, YP_{—}001500869.1, YP_{—}004305296.1, YP_{—}003342584.1, NP_{—}947961.1, ZP_{—}05124765.1, ZP_{—}01904700.1, YP_{—}003696207.1, YP_{—}004156699.1, YP_{—}001241858.1, NP_{—}104253.1, YP_{—}676241.1, ZP_{—}01736903.1, ZP_{—}00960121.1, NP_{—}436019.1, YP_{—}002945716.1, YP_{—}259594.1, EFV86615.1, AAY87334.1, NP_{—}900970.1, AEG07409.1, YP_{—}349087.1, YP_{—}004141055.1, YP_{—}001169476.1, YP_{—}001566960.1, YP_{—}260472.1, ZP_{—}07028078.1, YP_{—}004610468.1, YP_{—}003066461.1, YP_{—}961096.1, ZP_{—}08666573.1, ZP_{—}02187363.1, YP_{—}001631518.1, ZP_{—}08141293.1, YP_{—}001666324.1, NP_{—}387083.1, YP_{—}001526184.1, YP_{—}165213.1, YP_{—}003694923.1, YP_{—}004433897.1, YP_{—}001265431.1, ZP_{—}05068964.1, YP_{—}002313077.1, ZP_{—}02372305.1, YP_{—}004486039.1, YP_{—}341901.1, YP_{—}001862312.1, YP_{—}004681983.1, YP_{—}617373.1, EFV86570.1, YP_{—}001673285.1, BAK39604.1, YP_{—}001669327.1, YP_{—}004353150.1, YP_{—}001888124.1, ZP_{—}08645365.1, YP_{—}003410784.1, YP_{—}841363.1, EGP44033.1, YP_{—}001633470.1, EGP42855.1, ZP_{—}01115125.1, ADR57794.1, YP_{—}784649.1, YP_{—}373898.1, Q47944.1, YP_{—}001117950.1, ZP_{—}02380339.1, ZP_{—}03697092.1, YP_{—}003187112.1, YP_{—}004065439.1, NP_{—}742226.1, YP_{—}002429878.1, YP_{—}003556403.1, AEH81535.1, YP_{—}001887935.1, YP_{—}554605.1, ZP_{—}07333059.1, YP_{—}001991668.1, YP_{—}003694210.1, YP_{—}222680.1, YP_{—}002232672.1, YP_{—}001763402.1, YP_{—}001806802.1, YP_{—}662156.1, ZP_{—}05153429.1, ZP_{—}01893457.1, ZP_{—}04595387.1, ADP99389.1, ZP_{—}02890074.1, YP_{—}001313582.1, NP_{—}387401.1, ZP_{—}01863693.1, YP_{—}750630.1, ZP_{—}04939997.1, YP_{—}268077.1, ZP_{—}05169265.1, NP_{—}888994.1, ZP_{—}08408421.1, YP_{—}001155137.1, NP_{—}699017.1, YP_{—}002008190.1, YP_{—}004493716.1, YP_{—}266277.1, YP_{—}004654190.1, YP_{—}943422.1, ZP_{—}05162503.1, ZP_{—}02905080.1, ZP_{—}02905080.1, ZP_{—}03784461.1, YP_{—}001601784.1, YP_{—}002233786.1, YP_{—}622842.1, YP_{—}002822679.1, ZP_{—}04944312.1, ZP_{—}05179897.1, YP_{—}004483124.1, YP_{—}003390414.1, YP_{—}771968.1, YP_{—}001628465.1, YP_{—}004311599.1, ZP_{—}01037150.1, ZP_{—}01611812.1, ZP_{—}03575238.1, YP_{—}002278603.1, YP_{—}001593845.1, EGD01613.1, YP_{—}297574.1, YP_{—}367509.1, YP_{—}998315.1, ZP_{—}08664883.1, ZP_{—}05114787.1, ZP_{—}05450190.1, YP_{—}298028.1, ZP_{—}01034678.1, YP_{—}002827796.1, YP_{—}372762.1, YP_{—}004466723.1, ZP_{—}01012072.1, YP_{—}320380.1, ZP_{—}01075202.1, YP_{—}001312358.1, YP_{—}681895.1, ZP_{—}07718189.1, EGP55868.1, YP_{—}003750799.1, YP_{—}002984725.1, YP_{—}002543360.1, ZP_{—}01040714.1, ZP_{—}04717111.1, YP_{—}002422932.1, YP_{—}003506115.1, ZP_{—}01444019.1, ZP_{—}03587285.1, YP_{—}771439.1, YP_{—}001947593.1, YP_{—}001049712.1, YP_{—}003979888.1, YP_{—}001553786.1, YP_{—}003980878.1, YP_{—}001578274.1, YP_{—}472442.1, YP_{—}778292.1, EGE56670.1, YP_{—}002779312.1, YP_{—}432169.1, YP_{—}560963.1, YP_{—}001265285.1, YP_{—}002822699.1, YP_{—}002278091.1, ZP_{—}08632361.1, YP_{—}002229178.1, ZP_{—}06840392.1, ZP_{—}05069105.1, ZP_{—}00998644.1, YP_{—}004487901.1, YP_{—}680905.1, YP_{—}728088.1, YP_{—}001985833.1, YP_{—}002007099.1, ZP_{—}05066777.1, ZP_{—}01551182.1, YP_{—}002973332.1, ZP_{—}04681414.1, ZP_{—}07675148.1, AEH83964.1, YP_{—}004692042.1, CBJ36337.1, EGP48473.1, ZP_{—}03585612.1, YP_{—}001369428.1, YP_{—}001897527.1, AEG08472.1, YP_{—}001166065.1, NP_{—}437018.1, NP_{—}294689.1, YP_{—}002541437.1, YP_{—}004692953.1, NP_{—}107484.1, YP_{—}995681.1, YP_{—}765267.1, YP_{—}166223.1, ZP_{—}01740635.1, YP_{—}001234127.1, ZP_{—}02186681.1, YP_{—}004140839.1, YP_{—}001584499.1, ADI17244.1, ZP_{—}08698744.1, YP_{—}001022991.1, EFV84582.1, ZP_{—}01743515.1, YP_{—}001816113.1, YP_{—}004688050.1, YP_{—}001342912.1, ZP_{—}01125614.1, EGD05029.1, ZP_{—}03569823.1, ZP_{—}05089337.1, YP_{—}001901091.1, NP_{—}886663.1, ZP_{—}07718907.1, YP_{—}004687387.1, NP_{—}521464.1, ZP_{—}06688394.1, ZP_{—}08099738.1, ZP_{—}02885452.1, YP_{—}003744085.1, YP_{—}001328823.1, ZP_{—}02488044.1, ZP_{—}01015005.1, YP_{—}002983153.1, ZP_{—}06898725.1, ZP_{—}05886707.1, ZP_{—}08101209.1, ZP_{—}03319462.1, YP_{—}003134969.1, YP_{—}001188857.1, YP_{—}004557767.1, YP_{—}004675666.1, YP_{—}004358728.1, YP_{—}002252541.1, YP_{—}684009.1, ZP_{—}05085667.1, ZP_{—}02144674.1, YP_{—}004127560.1, ZP_{—}01901604.1, YP_{—}004280074.1, AEG67402.1, YP_{—}001416516.1, ZP_{—}01054720.1, ZP_{—}08197897.1, NP_{—}107235.1, YP_{—}002909966.1, ZP_{—}01545876.1, ZP_{—}02147729.1, ZP_{—}00946537.1, ZP_{—}01903844.1, ZP_{—}05085589.1, ACV84069.1, YP_{—}367172.1, ZP_{—}02165272.1, YP_{—}701696.1, ZP_{—}04935724.1, ZP_{—}02191362.1, ZP_{—}01740154.1, ZP_{—}07662819.1, NP_{—}103908.1, YP_{—}003159313.1, YP_{—}003197010.1, ZP_{—}02152342.1, YP_{—}001907189.1, YP_{—}004387414.1, YP_{—}001413869.1, ZP_{—}01916549.1, ZP_{—}03264661.1, AAY82840.1, YP_{—}003277969.1, YP_{—}767433.1, ZP_{—}01226234.1, EGE55950.1, NP_{—}882474.1, ZP_{—}04680938.1, YP_{—}004417965.1, ZP_{—}01367142.1, EGM13684.1, YP_{—}001262083.1, ZP_{—}01881606.1, ZP_{—}01002680.1, YP_{—}003606679.1, YP_{—}001868359.1, ZP_{—}01446736.1, YP_{—}004141411.1, YP_{—}002438878.1, YP_{—}002500414.1, EGP55675.1, ZP_{—}08405873.1, YP_{—}002975318.1, YP_{—}002823637.1, ZP_{—}02188786.1, YP_{—}004617386.1, ABL61001.1, YP_{—}004190679.1, YP_{—}004418710.1, YP_{—}001264994.1, NP_{—}252399.1, ACA21517.1, YP_{—}002541208.1, YP_{—}001369943.1, YP_{—}789454.1, YP_{—}004688060.1, YP_{—}611623.1, ZP_{—}07795086.1, ZP_{—}04929943.1, YP_{—}004444316.1, ZP_{—}01866687.1, ZP_{—}05973466.1, YP_{—}004353327.1, ZP_{—}05780591.1, ZP_{—}05784784.1, NP_{—}936564.1, ZP_{—}05739211.1, ZP_{—}05113045.1, ZP_{—}06689273.1, ZP_{—}06972168.1, ZP_{—}01616404.1, ZP_{—}07659253.1, ZP_{—}05117914.1, YP_{—}585662.1, YP_{—}004230016.1, NP_{—}763554.1, NP_{—}744101.1, ZP_{—}02465308.1, ACN56476.1, YP_{—}004689565.1, YP_{—}001600608.1, ZP_{—}06792595.1, YP_{—}001258553.1, ZP_{—}05165722.1, ZP_{—}03785098.1, YP_{—}002276744.1, YP_{—}002524856.1, ADP98420.1, YP_{—}001669248.1, ZP_{—}04764988.1, ZP_{—}08528163.1, ZP_{—}08529409.1, ZP_{—}05944625.1, YP_{—}676267.1, CBA26630.1, YP_{—}001592413.1, YP_{—}003486465.1, ZP_{—}02187562.1, ZP_{—}03702891.1, YP_{—}760283.1, ZP_{—}05450850.1, YP_{—}004533595.1, ZP_{—}02153313.1, YP_{—}001859265.1, YP_{—}001524099.1, ZP_{—}06126913.1, ZP_{—}07374926.1, ZP_{—}05050787.1, ZP_{—}01035411.1, Q8YFY2.2, YP_{—}002280903.1, EGM21512.1, YP_{—}004603010.1, ZP_{—}05088581.1, YP_{—}004302488.1, YP_{—}004141219.1, NP_{—}697569.1, YP_{—}003908705.1, YP_{—}915505.1, YP_{—}001789228.1, YP_{—}001042739.1, YP_{—}133405.1, ZP_{—}05180516.1, ZP_{—}05174702.1, ZP_{—}01438051.1, ZP_{—}04590345.1, ZP_{—}08411937.1, NP_{—}356519.2, ZP_{—}00964019.1, ZP_{—}00998343.1, ZP_{—}05181994.1, YP_{—}004107969.1, ZP_{—}02168070.1, ZP_{—}01750865.1, YP_{—}574504.1, YP_{—}004579902.1, YP_{—}104440.1, ZP_{—}05452167.1, ZP_{—}05342702.1, YP_{—}001862883.1, YP_{—}004538242.1, ZP_{—}07471513.1, ZP_{—}05169558.1, ZP_{—}00956995.1, ZP_{—}05096699.1, YP_{—}004610916.1, ZP_{—}01218118.1, AAU95210.1, ZP_{—}02405087.1, ZP_{—}04890639.1, YP_{—}352237.1, ZP_{—}02413594.1, ZP_{—}07474023.1, NP_{—}541317.1, YP_{—}001993222.1, ZP_{—}08199001.1, YP_{—}471839.1, ZP_{—}02492080.1, ZP_{—}04901176.1, ZP_{—}06915396.1, ZP_{—}07474845.1, ZP_{—}07477743.1, YP_{—}004152647.1, YP_{—}004755056.1, ZP_{—}05086419.1, YP_{—}004577547.1, ACD99850.1, YP_{—}980426.1, ZP_{—}05457072.1, ZP_{—}05936041.1, NP_{—}700124.1, ADT85599.1, YP_{—}110012.1, ZP_{—}05076113.1, YP_{—}001068288.1, ZP_{—}02457871.1, ZP_{—}01014169.1, EGE60620.1, YP_{—}001346810.1, YP_{—}003408795.1, YP_{—}003769675.1, YP_{—}001257876.1, EGH93583.1, ZP_{—}01442222.1, YP_{—}331617.1, ZP_{—}05636703.1, YP_{—}001594896.1, YP_{—}002822967.1, YP_{—}118823.1, ZP_{—}01878717.1, ZP_{—}07375284.1, YP_{—}001371250.1, ZP_{—}07658682.1, YP_{—}002898825.1, ZP_{—}01547199.1, YP_{—}223070.1, ZP_{—}05161482.1, ZP_{—}04679742.1, YP_{—}002778618.1, ZP_{—}01626756.1, ZP_{—}05101564.1, YP_{—}002947374.1, NP_{—}385053.1, YP_{—}001328117.1, YP_{—}004493948.1, YP_{—}003339515.1, YP_{—}004699488.1, ZP_{—}05101969.1, YP_{—}485352.1, ZP_{—}01746033.1, ZP_{—}06712293.1, ZP_{—}01158125.1, ZP_{—}01058616.1, ZP_{—}05739755.1, NP_{—}949067.1, ZP_{—}02364657.1, YP_{—}570690.1, YP_{—}001208663.1, ZP_{—}02357557.1, ZP_{—}04751682.1, YP_{—}001326253.1, YP_{—}487666.1, ZP_{—}05167919.1, ADI18237.1, YP_{—}002825245.1, ZP_{—}02144858.1, ZP_{—}02188790.1, ZP_{—}06794586.1, YP_{—}001809828.1, YP_{—}997974.1, YP_{—}001476791.1, ZP_{—}08635286.1, YP_{—}676287.1, ZP_{—}07308228.1, ZP_{—}04596242.1, YP_{—}001622726.1, NP_{—}699590.1, ZP_{—}01446884.1, YP_{—}001168504.1, ZP_{—}01616388.1, ZP_{—}05117189.1, ZP_{—}05876432.1, ADT64694.1, ZP_{—}01754911.1, ZP_{—}05880498.1, ZP_{—}02360829.1, ZP_{—}06052433.1, ZP_{—}08663540.1, YP_{—}003768966.1, ZP_{—}02165422.1, ZP_{—}00960985.1, ZP_{—}07026655.1, YP_{—}001753039.1, YP_{—}371288.1, YP_{—}002974725.1, YP_{—}776880.1, ZP_{—}05784963.1, ZP_{—}05124380.1, YP_{—}459030.1, ZP_{—}05090690.1, ZP_{—}05064893.1, ZP_{—}02367982.1, ZP_{—}01890564.1, NP 541848.1, ZP_{—}00960263.1, ZP_{—}02961617.1, YP_{—}001242097.1, ZP_{—}05838258.1,
in particular
000593.1, Q9WWW2.1, ZP_{—}00957061.1, YP_{—}957894.1, CAC38030.1, YP_{—}694430.1, YP_{—}957725.1, YP_{—}001672216.1, YP_{—}552061.1, YP_{—}130410.1, ZP_{—}06155535.1, ZP_{—}01222730.1, YP_{—}691907.1, YP_{—}002297804.1, YP_{—}004283522.1, YP_{—}001234383.1, YP_{—}004435031.1, ZP_{—}05110316.1, ZP_{—}05042898.1, YP_{—}004466324.1, ZP_{—}08553549.1, YP_{—}004125220.1, ADI22536.1, ADI18461.1, YP_{—}003810975.1, YP_{—}662346.1, YP_{—}004427557.1, YP_{—}692606.1, ZP_{—}05043291.1, YP_{—}440752.1, ZP_{—}02386160.1, ZP_{—}04763547.1, ZP_{—}02361232.1, YP_{—}003376674.1, ZP_{—}02354055.1, ZP_{—}05085930.1, ADQ00130.1, YP_{—}003643016.1, ZP_{—}05040520.1, YP_{—}691922.1, AAX23098.1, BAD07371.1, NP_{—}104379.1, YP_{—}002551960.1, YP_{—}003908558.1, YP_{—}987903.1, ZP_{—}05785860.1, YP_{—}004145612.1, YP_{—}004140926.1, CAZ88300.1,
and especially preferably

### Q00593.1, Q9WWW2.1, ZP_{—}00957061.1, YP_{—}957894.1, CAC38030.1, YP_{—}694430.1, YP_{—}957725.1, YP_{—}001672216.1.

[0165] and
proteins with a polypeptide sequence in which up to 60%, preferably up to 25%, especially preferably up to 15%, in particular up to 10, 9, 8, 7, 6, 5, 4, 3, 2, 1% of the amino acid residues are modified in comparison with the abovementioned reference sequences by deletion, insertion, substitution, or a combination thereof and which still have at least 50%, preferably 65%, especially preferably 80%, in particular more than 90%, of the activity of the protein with the corresponding abovementioned reference sequence, where 100% activity of the reference protein is understood as meaning the increase of the activity of the cells used as biocatalyst, that is to say the amount of substance reacted per unit time, based on the cell weight used (units per gram of cell dry weight [U/g CDW]), compared with the activity of the biocatalyst without the presence of the reference protein, where activity in this context and in the context of the determination of the activity of the enzyme E_{1d} is generally understood in particular as meaning the conversion of dodecan-1-ol into dodecan-1-al or dodecan-1-al into dodecanoic acid.

### Specific Enzymes E₁ₑ

[0166] Such preferred alcohol dehydrogenases of EC 1.1.1.1 or EC 1.1.1.2 are selected from among

AdhE, AdhP, YjgB, YqhD, GIdA, EutG, YiaY, AdhE, AdhP, YhhX, YahK, HdhA, HisD, SerA, Tdh, Ugd, Udg, Gmd, YefA, YbiC, YdfG, YeaU, TtuC, YeiQ, YgbJ, YgcU, YgcT, YgcV, YggP, YgjR, YliI, YqiB, YzzH, LdhA, GapA, Epd, Dld, GatD, Gcd, GlpA, GlpB, GlpC, GlpD, GpsA and YphC from bacteria, in particular E. coli,
and
proteins with a polypeptide sequence in which up to 60%, preferably up to 25%, especially preferably up to 15%, in particular up to 10, 9, 8, 7, 6, 5, 4, 3, 2, 1% of the amino acid residues are modified in comparison with the abovementioned reference sequences by deletion, insertion, substitution, or a combination thereof and which still have at least 50%, preferably 65%, especially preferably 80%, in particular more than 90%, of the activity of the protein with the corresponding abovementioned reference sequence, where 100% activity of the reference protein is understood as meaning the increase of the activity of the cells used as biocatalyst, that is to say the amount of substance reacted per unit time, based on the cell weight used (units per gram of cell dry weight [U/g CDW]), compared with the activity of the biocatalyst without the presence of the reference protein, where activity in this context and in the context of the determination of the activity of the enzyme E₁ₑ is generally understood in particular as meaning the conversion of dodecan-1-al into dodecanoic acid.

### Specific Enzymes E_{1f}

[0167] Such preferred aldehyde dehydrogenases are selected from among Prr, Usg, MhpF, AstD, GdhA, FrmA, Feab, Asd, Sad, PuuE, GabT, YgaW, BetB, PutA, PuuC, FeaB, AldA, Prr, EutA, GabD, AIdB, TynA and YneI from bacteria, in particular E. coli,

and
proteins with a polypeptide sequence in which up to 60%, preferably up to 25%, especially preferably up to 15%, in particular up to 10, 9, 8, 7, 6, 5, 4, 3, 2, 1% of the amino acid residues are modified in comparison with the abovementioned reference sequences by deletion, insertion, substitution, or a combination thereof and which still have at least 50%, preferably 65%, especially preferably 80%, in particular more than 90%, of the activity of the protein with the corresponding abovementioned reference sequence, where 100% activity of the reference protein is understood as meaning the increase of the activity of the cells used as biocatalyst, that is to say the amount of substance reacted per unit time, based on the cell weight used (units per gram of cell dry weight [U/g CDW]), compared with the activity of the biocatalyst without the presence of the reference protein, where activity in this context and in the context of the determination of the activity of the enzyme E_{1f} is generally understood in particular as meaning the conversion of dodecan-1-al into dodecanoic acid.

### Auxiliary Enzymes for E₁ₐ

[0168] It is preferred according to the invention that, when the activity of an enzyme E₁ₐ, a eukaryotic P450 alkane hydroxylase, is reduced, the microorganism according to the invention also has an activity of an NADPH-cytochrome P450 oxidoreductase of EC 1.6.2.4 which is reduced in comparison with its wild type. This has the technical effect of the activity of the eukaryotic P450 alkane hydroxylases is reduced further and the product yields of alkan-1-ols, alkan-1-als, alkan-1-amines, alkanes and terminal olefins are increased.

[0169] NADPH-cytochrome P450 oxidoreductases of EC 1.6.2.4 catalyse the following reaction: oxidized cytochrome P450+NADPH⁺=reduced cytochrome P450+NADP⁺+H⁺

[0170] It is preferred according to the invention that, when the activity of an enzyme E₁ₐ, a prokaryotic P450 alkane hydroxylase, is reduced, the microorganism according to the invention also has an activity of a ferredoxin-NAD(P)⁺ reductase of EC 1.18.1.2 or EC 1.18.1.3 and/or of a ferredoxin which is reduced in comparison with its wild type. This has the technical effect that the activity of the prokaryotic P450 alkane hydroxylase of the CYP_{—}153 type is reduced further and that the product yields of alkan-1-ols, alkan-1-als, alkan-1-amines, alkanes and terminal olefins are increased.

[0171] Ferredoxin-NAD(P)⁺ reductases of EC 1.18.1.2 or EC 1.18.1.3 catalyse the following reaction: oxidized ferredoxin+NAD(P)H+H⁺=reduced ferredoxin+NAD(P)⁺ and are preferably encoded by a gene which is located in the immediate vicinity of a gene of an abovementioned prokaryotic P450 alkane hydroxylase of the CYP_{—}153 type or of a ferredoxin described in the context of the present invention.

[0172] The expression “in the immediate vicinity” means that not more than three other structural genes are located between the genes in question.

[0173] Ferredoxins catalyse the following reactions:

alkane hydroxylase+reduced ferredoxin+alkanoic acid (ester)=alkane monoxygenase+oxidized ferredoxin+ω-hydroxyalkanoic acid (ester)+H₂O,
alkane hydroxylase+2 reduced ferredoxins+alkanoic acid (ester)=alkane hydroxylase+2 oxidized ferredoxins+ω-oxoalkanoic acid (ester)+2H₂O or
alkane hydroxylase+3 reduced ferredoxins+alkanoic acid (ester)=alkane hydroxylase+3 oxidized ferredoxins+ω-carboxyalkanoic acid (ester)+3H₂O and
are preferably encoded by a gene which is located in the immediate vicinity of a gene of an abovementioned prokaryotic P450 alkane hydroxylase of the CYP_{—}153 type or of an abovementioned ferredoxin-NAD(P)⁺ reductase of EC 1.18.1.2 or EC 1.18.1.3. The expression “in the immediate vicinity” means that not more than three other structural genes are located between the genes in question.

[0174] Preferred microorganisms have an activity of the ferredoxin-NAD(P)⁺ reductase AlkT and of a ferredoxin which is increased in comparison with their wild type.

### Auxiliary Enzymes for E_{1b}

[0175] It is preferred according to the invention that, when the activity of an enzyme E_{1b}, an AlkB alkane hydroxylase of EC 1.14.15.3, is reduced, the microorganism according to the invention likewise has an activity of an AlkT rubredoxin-NAD(P)⁺ reductase of EC 1.18.1.1 or of EC 1.18.1.4 and/or of a rubredoxin AlkG which is increased in comparison with its wild type. This has the technical effect that the activity of the AlkB alkane hydroxylase is enhanced and the product yields are increased.

[0176] AlkT rubredoxin-NAD(P)⁺ reductases of EC 1.18.1.1 or EC 1.18.1.4 catalyse the following reaction:

oxidized rubredoxin+NAD(P)H+H⁺=reduced rubredoxin+NAD(P)⁺ and are preferably encoded by a gene which is located in the immediate vicinity of a gene of an abovementioned AlkB alkane hydroxylase of EC 1.14.15.3 or of a rubredoxin AlkG described in the context of the present invention.

[0177] The expression “in the immediate vicinity” means that not more than three other structural genes are located between the genes in question.

[0178] Rubredoxins AlkG catalyse the following reactions:

alkane monoxygenase+reduced rubredoxin+alkanoic acid (ester)=alkane monoxygenase+oxidized rubredoxin+ω-hydroxyalkanoic acid (ester)+H₂O, alkane monoxygenase+2 reduced rubredoxins+alkanoic acid (ester)=alkane monoxygenase+2 oxidized rubredoxins+ω-oxoalkanoic acid (ester)+2H₂O or
alkane monoxygenase+3 reduced rubredoxins+alkanoic acid (ester)=alkane monoxygenase+3 oxidized rubredoxins+ω-carboxyalkanoic acid (ester)+3H₂O and
are preferably encoded by a gene which is located in the immediate vicinity of a gene of an abovementioned AlkB alkane hydroxylase of EC 1.14.15.3 or of an abovementioned AlkT rubredoxin-NAD(P)⁺ reductase of EC 1.18.1.1 or EC 1.18.1.4. The expression “in the immediate vicinity” means that not more than three other structural genes are located between the genes in question.

[0179] Preferred microorganisms have an activity of the AlkT rubredoxin-NAD(P)⁺ reductase and of rubredoxin AlkG which is reduced in comparison to their wild type.

### Specific Embodiments of Preferred Microorganisms and Enzymes

[0180] According to the invention, microorganisms are especially preferably selected from among those which include

a first and a second genetic modification within the meaning of the invention,
a first, a second and a fifth genetic modification within the meaning of the invention,
a first, a second and a sixth genetic modification within the meaning of the invention,
a first, a second and a seventh genetic modification within the meaning of the invention,
a first, a second, a fifth and a sixth genetic modification within the meaning of the invention,
a first, a second, a fifth and a seventh genetic modification within the meaning of the invention,
a first, a second, a sixth and a seventh genetic modification within the meaning of the invention,
a first, a second, a fifth, a sixth and a seventh genetic modification within the meaning of the invention,
a first, a second and a third genetic modification within the meaning of the invention,
a first, a second, a third and a fifth genetic modification within the meaning of the invention,
a first, a second, a third and a sixth genetic modification within the meaning of the invention,
a first, a second, a third and a seventh genetic modification within the meaning of the invention,
a first, a second, a third, a fifth and a sixth genetic modification within the meaning of the invention,
a first, a second, a third, a fifth and a seventh genetic modification within the meaning of the invention,
a first, a second, a third, a sixth and a seventh genetic modification within the meaning of the invention,
a first, a second, a third, a fifth, a sixth and a seventh genetic modification within the meaning of the invention,
a first, a second and a fourth genetic modification within the meaning of the invention,
a first, a second, a fourth and a fifth genetic modification within the meaning of the invention,
a first, a second, a fourth and a sixth genetic modification within the meaning of the invention,
a first, a second, a fourth and a seventh genetic modification within the meaning of the invention,
a first, a second, a fourth, a fifth and a sixth genetic modification within the meaning of the invention,
a first, a second, a fourth, a fifth and a seventh genetic modification within the meaning of the invention,
a first, a second, a fourth, a sixth and a seventh genetic modification within the meaning of the invention or
a first, a second, a fourth, a fifth, a sixth and a seventh genetic modification within the meaning of the invention.

[0181] Microorganisms which are especially preferred according to the invention are those which include a first genetic modification so that they are capable of forming more carboxylic acids and carboxylic acid derivatives from at least one simple carbon source in comparison with their wild type, where the first genetic modification represents an activity of at least one of the enzymes Eᵢ or one of the enzymes with a polypeptide sequence in which up to 60%, preferably up to 25%, especially preferably up to 15%, in particular up to 10, 9, 8, 7, 6, 5, 4, 3, 2, 1% amino acid residues are modified by deletion, insertion, substitution or a combination thereof over the sequences specified by references in the table hereinbelow and which still have at least 50%, preferably 65%, especially preferably 80%, in particular more than 90% of the activity of the protein with the respective reference sequence, which activity is increased in comparison with the enzymatic activity of the wild type of the microorganism and where activity in this context and in the context of the determination of the activity of the enzyme Eᵢ generally means in particular the hydrolysis of dodecanoyl-ACP thioester with the carbon chain length assigned to the individual enzymes Eᵢ in the table hereinbelow

and the carboxylic acid and carboxylic acid derivatives have a carbon chain length of the carboxylic acid moiety as represented in the table hereinbelow:

| Enzyme Eᵢ selected from among | Carbon chain length |
|---|---|
| AAC49269.1, CAB60830.1, AAC49179.1, | C8 |
| AAC49784.1, ABB71579.1, CAC19934.1 | |
| and SEQ ID No.: 26, 29, 33, 38, 40, 97 and | |
| 99 of WO2011008565 | |
| AAC49269.1, CAB60830.1, AAC49179.1, | C10 |
| AAC49784.1, ABB71579.1, CAC19934.1 | |
| and SEQ ID No.: 73, 75, 87 and 89 of | |
| WO2011008565. | |
| Q41635.1, Q39473.1, AAC49180.1, | C12 |
| CAC19934.1, AAC72881.1, AAC49783.1, | |
| AAC49784.1 and SEQ ID No.: 49 and 51 of | |
| WO2011008565. | |
| Q41635.1, Q39473.1, AAC49180.1, | C14 |
| CAC19934.1, AAC72881.1 AAC49783.1, | |
| AAC49784.1 and SEQ ID No.: 49, 51, 53, | |
| 55, 61, 63, 67, 69, 77, 79, 83 and 85 of | |
| WO2011008565. | |

[0182] The abovementioned deletions of amino acid residues over the sequences specified by references in the table hereinabove refer in particular to deletions at the N- and/or C-terminus, in particular the N-terminus. The abovementioned N-terminus is especially preferably that of a plant plastid targeting sequence. Such plant plastid targeting sequences can be predicted for example with the aid of the algorithms employed by the prediction tool TargetP 1.1 (www.cbs.dtu.dk/services/TargetP/) and described in the following publications, preferably without using cutoffs:

Predicting Subcellular Localization of Proteins Based on their N-Terminal Amino Acid Sequence.

[0183] Olof Emanuelsson, Henrik Nielsen, Søren Brunak and Gunnar von Heijne.

[0184] J. Mol. Biol., 300: 1005-1016, 2000 and Identification of prokaryotic and eukaryotic signal peptides and prediction of their cleavage sites. Henrik Nielsen, Jacob Engelbrecht, Soren Brunak and Gunnar von Heijne. Protein Engineering, 10:1-6, 1997.

[0185] Microorganisms (abbreviated to MO) which are very especially preferred according to the invention are outstandingly suitable for the production of carboxylic acids and have increased or reduced enzymatic activities (abbreviated to E) which are described in the table hereinbelow, it being possible for these enzymatic activities additionally to be advantageously combined with an enzymatic activity described for the enzyme 3-ketoacyl-ACP (acyl carrier protein) synthase III (EC 2.3.1.41), which enzymatic activity is increased in comparison with the wild type of the microorganism, in particular the enzymatic activity of plants, preferably the enzymatic activity of plants whose seeds contain fatty acids with alkyl residues shorter than 14 C atoms and especially preferably the enzymatic activity of plants of the genera Cuphea, Elaeis, Cocos, Umbellularia and Cinnamomum and gene products selected from among AccA, AccB, AccC, AccD, AceE, AceF, Lpd, AcpP, FabA, FabB, FabD, FabF, FabG, FabH, FabI, FabZ, PanD, PanK, UdhA, PntA or PntB.

[0186] Any desired combinations of at least two of these enzymatic activities may advantageously be increased.

[0187] It may be additionally advantageous that the microorganism is equipped with an enzymatic activity which is described for the gene products selected from among TdcE, PflA, PflB, PflC, PfID, PoxB, YgfG, AckA, AckB, TdcD, Pta, LdhA, AdhE, MgsA, FdnG, FdnH, FdnI, FdhF, FdoG, FdoH, FdoI, PrpC, PrpD, PrpF, PrpB, TdcD, Pdc, PorA, PorB, PorC, PorD, AlsS, IlvB, IlvM, IlvN, IlvG, IlyI, IlvH, AlsD, ButB, Thl, ThlA, ThlB, PhaA, PhaB, Crt, BdhA, BdhB, Adc, Adh, CtfB, AtoA, AtoD, LdhL, GltA, FabR, FhuA, Dld, LldA or LldP, individually or in any desired combination, and which is reduced in comparison with the wild type of the microorganism.

| | | |
|---|---|---|
| MO | Increased E | Reduced E |

| | | | |
|---|---|---|---|
| 1 | AlkL | | |
| 2 | AlkLEᵢ | | |
| 3 | AlkLEᵢᵢ | | |
| 4 | AlkLEᵢᵢE_{iib} | | |
| 5 | AlkLEᵢᵢᵢ | | |
| 6 | AlkLEᵢᵥ | | |
| 7 | AlkL | Eₐ | |
| 8 | AlkLEᵢ | Eₐ | |
| 9 | AlkLEᵢᵢ | Eₐ | |
| 10 | AlkLEᵢᵢE_{iib} | Eₐ | |
| 11 | AlkLEᵢᵢᵢ | Eₐ | |
| 12 | AlkLEᵢᵥ | Eₐ | |
| 13 | AlkL | E_{b} | |
| 14 | AlkLEᵢ | E_{b} | |
| 15 | AlkLEᵢᵢ | E_{b} | |
| 16 | AlkLEᵢᵢE_{iib} | E_{b} | |
| 17 | AlkLEᵢᵢᵢ | E_{b} | |
| 18 | AlkLEᵢᵥ | E_{b} | |
| 19 | AlkL | E_{d} | |
| 20 | AlkLEᵢ | E_{d} | |
| 21 | AlkLEᵢᵢ | E_{d} | |
| 22 | AlkLEᵢᵢE_{iib} | E_{d} | |
| 23 | AlkLEᵢᵢᵢ | E_{d} | |
| 24 | AlkLEᵢᵥ | E_{d} | |
| 25 | AlkL | Eₑ | |
| 26 | AlkLEᵢ | Eₑ | |
| 27 | AlkLEᵢᵢ | Eₑ | |
| 28 | AlkLEᵢᵢE_{iib} | Eₑ | |
| 29 | AlkLEᵢᵢᵢ | Eₑ | |
| 30 | AlkLEᵢᵥ | Eₑ | |
| 31 | AlkL | E_{f} | |
| 32 | AlkLEᵢ | E_{f} | |
| 33 | AlkLEᵢᵢ | E_{f} | |
| 34 | AlkLEᵢᵢE_{iib} | E_{f} | |
| 35 | AlkLEᵢᵢᵢ | E_{f} | |
| 36 | AlkLEᵢᵥ | E_{f} | |
| 37 | AlkL | | E₁ |
| 38 | AlkLEᵢ | | E₁ |
| 39 | AlkLEᵢᵢ | | E₁ |
| 40 | AlkLEᵢᵢE_{iib} | | E₁ |
| 41 | AlkLEᵢᵢᵢ | | E₁ |
| 42 | AlkLEᵢᵥ | | E₁ |
| 43 | AlkL | Eₐ | E₁ |
| 44 | AlkLEᵢ | Eₐ | E₁ |
| 45 | AlkLEᵢᵢ | Eₐ | E₁ |
| 46 | AlkLEᵢᵢE_{iib} | Eₐ | E₁ |
| 47 | AlkLEᵢᵢᵢ | Eₐ | E₁ |
| 48 | AlkLEᵢᵥ | Eₐ | E₁ |
| 49 | AlkL | E_{b} | E₁ |
| 50 | AlkLEᵢ | E_{b} | E₁ |
| 51 | AlkLEᵢᵢ | E_{b} | E₁ |
| 52 | AlkLEᵢᵢE_{iib} | E_{b} | E₁ |
| 53 | AlkLEᵢᵢᵢ | E_{b} | E₁ |
| 54 | AlkLEᵢᵥ | E_{b} | E₁ |
| 55 | AlkL | E_{d} | E₁ |
| 56 | AlkLEᵢ | E_{d} | E₁ |
| 57 | AlkLEᵢᵢ | E_{d} | E₁ |
| 58 | AlkLEᵢᵢE_{iib} | E_{d} | E₁ |
| 59 | AlkLEᵢᵢᵢ | E_{d} | E₁ |
| 60 | AlkLEᵢᵥ | E_{d} | E₁ |
| 61 | AlkL | Eₑ | E₁ |
| 62 | AlkLEᵢ | Eₑ | E₁ |
| 63 | AlkLEᵢᵢ | Eₑ | E₁ |
| 64 | AlkLEᵢᵢE_{iib} | Eₑ | E₁ |
| 65 | AlkLEᵢᵢᵢ | Eₑ | E₁ |
| 66 | AlkLEᵢᵥ | Eₑ | E₁ |
| 67 | AlkL | E_{f} | E₁ |
| 68 | AlkLEᵢ | E_{f} | E₁ |
| 69 | AlkLEᵢᵢ | E_{f} | E₁ |
| 70 | AlkLEᵢᵢE_{iib} | E_{f} | E₁ |
| 71 | AlkLEᵢᵢᵢ | E_{f} | E₁ |
| 72 | AlkLEᵢᵥ | E_{f} | E₁ |

[0188] Microorganisms (abbreviated to MO) which are very especially preferred according to the invention are outstandingly suitable for the production of carboxylic acid esters and have increased or reduced enzymatic activities (abbreviated to E) which are described in the table hereinbelow, it being possible for these enzymatic activities additionally to be advantageously combined with an enzymatic activity described for the enzyme 3-ketoacyl-ACP (acyl carrier protein) synthase III (EC 2.3.1.41), which enzymatic activity is increased in comparison with the wild type of the microorganism, in particular the enzymatic activity of plants, preferably the enzymatic activity of plants whose seeds contain fatty acids with alkyl residues shorter than 14 C atoms and especially preferably the enzymatic activity of plants of the genera Cuphea, Elaeis, Cocos, Umbellularia and Cinnamomum and gene products selected from among AccA, AccB, AccC, AccD, AceE, AceF, Lpd, AcpP, FabA, FabB, FabD, FabF, FabG, FabH, FabI, FabZ, PanD, PanK, UdhA, PntA or PntB.

[0189] Any desired combinations of at least two of these enzymatic activities may advantageously be increased.

[0190] It may be additionally advantageous that the microorganism is equipped with an enzymatic activity which is described for the gene products selected from among TdcE, PflA, PflB, PflC, PfID, PoxB, YgfG, AckA, AckB, TdcD, Pta, LdhA, AdhE, MgsA, FdnG, FdnH, FdnI, FdhF, FdoG, FdoH, FdoI, PrpC, PrpD, PrpF, PrpB, TdcD, Pdc, PorA, PorB, PorC, PorD, AlsS, IlvB, IlvM, IlvN, IlvG, IlyI, IlvH, AlsD, ButB, Thl, ThlA, ThlB, PhaA, PhaB, Crt, BdhA, BdhB, Adc, Adh, CtfB, AtoA, AtoD, LdhL, GltA, FabR, FhuA, Dld, LldA or LldP, individually or in any desired combination, and which is reduced in comparison with the wild type of the microorganism.

| | | |
|---|---|---|
| MO | Increased E | Reduced E |

| | | | | |
|---|---|---|---|---|
| 1 | AlkL | Eᵥ | | |
| 2 | AlkLEᵢ | Eᵥ | | |
| 3 | AlkLEᵢᵢ | Eᵥ | | |
| 4 | AlkLEᵢᵢE_{iib} | Eᵥ | | |
| 5 | AlkLEᵢᵢᵢ | Eᵥ | | |
| 6 | AlkLEᵢᵥ | Eᵥ | | |
| 7 | AlkL | Eᵥ | Eₐ | |
| 8 | AlkLEᵢ | Eᵥ | Eₐ | |
| 9 | AlkLEᵢᵢ | Eᵥ | Eₐ | |
| 10 | AlkLEᵢᵢE_{iib} | Eᵥ | Eₐ | |
| 11 | AlkLEᵢᵢᵢ | Eᵥ | Eₐ | |
| 12 | AlkLEᵢᵥ | Eᵥ | Eₐ | |
| 13 | AlkL | Eᵥ | E_{b} | |
| 14 | AlkLEᵢ | Eᵥ | E_{b} | |
| 15 | AlkLEᵢᵢ | Eᵥ | E_{b} | |
| 16 | AlkLEᵢᵢE_{iib} | Eᵥ | E_{b} | |
| 17 | AlkLEᵢᵢᵢ | Eᵥ | E_{b} | |
| 18 | AlkLEᵢᵥ | Eᵥ | E_{b} | |
| 19 | AlkL | Eᵥ | E_{d} | |
| 20 | AlkLEᵢ | Eᵥ | E_{d} | |
| 21 | AlkLEᵢᵢ | Eᵥ | E_{d} | |
| 22 | AlkLEᵢᵢE_{iib} | Eᵥ | E_{d} | |
| 23 | AlkLEᵢᵢᵢ | Eᵥ | E_{d} | |
| 24 | AlkLEᵢᵥ | Eᵥ | E_{d} | |
| 25 | AlkL | Eᵥ | Eₑ | |
| 26 | AlkLEᵢ | Eᵥ | Eₑ | |
| 27 | AlkLEᵢᵢ | Eᵥ | Eₑ | |
| 28 | AlkLEᵢᵢE_{iib} | Eᵥ | Eₑ | |
| 29 | AlkLEᵢᵢᵢ | Eᵥ | Eₑ | |
| 30 | AlkLEᵢᵥ | Eᵥ | Eₑ | |
| 31 | AlkL | Eᵥ | E_{f} | |
| 32 | AlkLEᵢ | Eᵥ | E_{f} | |
| 33 | AlkLEᵢᵢ | Eᵥ | E_{f} | |
| 34 | AlkLEᵢᵢE_{iib} | Eᵥ | E_{f} | |
| 35 | AlkLEᵢᵢᵢ | Eᵥ | E_{f} | |
| 36 | AlkLEᵢᵥ | Eᵥ | E_{f} | |
| 37 | AlkL | EᵥEᵥᵢ | | |
| 38 | AlkLEᵢ | EᵥEᵥᵢ | | |
| 39 | AlkLEᵢᵢ | EᵥEᵥᵢ | | |
| 40 | AlkLEᵢᵢE_{iib} | EᵥEᵥᵢ | | |
| 41 | AlkLEᵢᵢᵢ | EᵥEᵥᵢ | | |
| 42 | AlkLEᵢᵥ | EᵥEᵥᵢ | | |
| 43 | AlkL | EᵥEᵥᵢ | Eₐ | |
| 44 | AlkLEᵢ | EᵥEᵥᵢ | Eₐ | |
| 45 | AlkLEᵢᵢ | EᵥEᵥᵢ | Eₐ | |
| 46 | AlkLEᵢᵢE_{iib} | EᵥEᵥᵢ | Eₐ | |
| 47 | AlkLEᵢᵢᵢ | EᵥEᵥᵢ | Eₐ | |
| 48 | AlkLEᵢᵥ | EᵥEᵥᵢ | Eₐ | |
| 49 | AlkL | EᵥEᵥᵢ | E_{b} | |
| 50 | AlkLEᵢ | EᵥEᵥᵢ | E_{b} | |
| 51 | AlkLEᵢᵢ | EᵥEᵥᵢ | E_{b} | |
| 52 | AlkLEᵢᵢE_{iib} | EᵥEᵥᵢ | E_{b} | |
| 53 | AlkLEᵢᵢᵢ | EᵥEᵥᵢ | E_{b} | |
| 54 | AlkLEᵢᵥ | EᵥEᵥᵢ | E_{b} | |
| 55 | AlkL | EᵥEᵥᵢ | E_{d} | |
| 56 | AlkLEᵢ | EᵥEᵥᵢ | E_{d} | |
| 57 | AlkLEᵢᵢ | EᵥEᵥᵢ | E_{d} | |
| 58 | AlkLEᵢᵢE_{iib} | EᵥEᵥᵢ | E_{d} | |
| 59 | AlkLEᵢᵢᵢ | EᵥEᵥᵢ | E_{d} | |
| 60 | AlkLEᵢᵥ | EᵥEᵥᵢ | E_{d} | |
| 61 | AlkL | EᵥEᵥᵢ | Eₑ | |
| 62 | AlkLEᵢ | EᵥEᵥᵢ | Eₑ | |
| 63 | AlkLEᵢᵢ | EᵥEᵥᵢ | Eₑ | |
| 64 | AlkLEᵢᵢE_{iib} | EᵥEᵥᵢ | Eₑ | |
| 65 | AlkLEᵢᵢᵢ | EᵥEᵥᵢ | Eₑ | |
| 66 | AlkLEᵢᵥ | EᵥEᵥᵢ | Eₑ | |
| 67 | AlkL | EᵥEᵥᵢ | E_{f} | |
| 68 | AlkLEᵢ | EᵥEᵥᵢ | E_{f} | |
| 69 | AlkLEᵢᵢ | EᵥEᵥᵢ | E_{f} | |
| 70 | AlkLEᵢᵢE_{iib} | EᵥEᵥᵢ | E_{f} | |
| 71 | AlkLEᵢᵢᵢ | EᵥEᵥᵢ | E_{f} | |
| 72 | AlkLEᵢᵥ | EᵥEᵥᵢ | E_{f} | |
| 73 | AlkL | Eᵥᵢᵢ | | |
| 74 | AlkLEᵢ | Eᵥᵢᵢ | | |
| 75 | AlkLEᵢᵢ | Eᵥᵢᵢ | | |
| 76 | AlkLEᵢᵢE_{iib} | Eᵥᵢᵢ | | |
| 77 | AlkLEᵢᵢᵢ | Eᵥᵢᵢ | | |
| 78 | AlkLEᵢᵥ | Eᵥᵢᵢ | | |
| 79 | AlkL | Eᵥᵢᵢ | Eₐ | |
| 80 | AlkLEᵢ | Eᵥᵢᵢ | Eₐ | |
| 81 | AlkLEᵢᵢ | Eᵥᵢᵢ | Eₐ | |
| 82 | AlkLEᵢᵢE_{iib} | Eᵥᵢᵢ | Eₐ | |
| 83 | AlkLEᵢᵢᵢ | Eᵥᵢᵢ | Eₐ | |
| 84 | AlkLEᵢᵥ | Eᵥᵢᵢ | Eₐ | |
| 85 | AlkL | Eᵥᵢᵢ | E_{b} | |
| 86 | AlkLEᵢ | Eᵥᵢᵢ | E_{b} | |
| 87 | AlkLEᵢᵢ | Eᵥᵢᵢ | E_{b} | |
| 88 | AlkLEᵢᵢE_{iib} | Eᵥᵢᵢ | E_{b} | |
| 89 | AlkLEᵢᵢᵢ | Eᵥᵢᵢ | E_{b} | |
| 90 | AlkLEᵢᵥ | Eᵥᵢᵢ | E_{b} | |
| 91 | AlkL | Eᵥᵢᵢ | E_{d} | |
| 92 | AlkLEᵢ | Eᵥᵢᵢ | E_{d} | |
| 93 | AlkLEᵢᵢ | Eᵥᵢᵢ | E_{d} | |
| 94 | AlkLEᵢᵢE_{iib} | Eᵥᵢᵢ | E_{d} | |
| 95 | AlkLEᵢᵢᵢ | Eᵥᵢᵢ | E_{d} | |
| 96 | AlkLEᵢᵥ | Eᵥᵢᵢ | E_{d} | |
| 97 | AlkL | Eᵥᵢᵢ | Eₑ | |
| 98 | AlkLEᵢ | Eᵥᵢᵢ | Eₑ | |
| 99 | AlkLEᵢᵢ | Eᵥᵢᵢ | Eₑ | |
| 100 | AlkLEᵢᵢE_{iib} | Eᵥᵢᵢ | Eₑ | |
| 101 | AlkLEᵢᵢᵢ | Eᵥᵢᵢ | Eₑ | |
| 102 | AlkLEᵢᵥ | Eᵥᵢᵢ | Eₑ | |
| 103 | AlkL | Eᵥᵢᵢ | E_{f} | |
| 104 | AlkLEᵢ | Eᵥᵢᵢ | E_{f} | |
| 105 | AlkLEᵢᵢ | Eᵥᵢᵢ | E_{f} | |
| 106 | AlkLEᵢᵢE_{iib} | Eᵥᵢᵢ | E_{f} | |
| 107 | AlkLEᵢᵢᵢ | Eᵥᵢᵢ | E_{f} | |
| 108 | AlkLEᵢᵥ | Eᵥᵢᵢ | E_{f} | |
| 109 | AlkL | EᵥᵢEᵥᵢᵢ | | |
| 110 | AlkLEᵢ | EᵥᵢEᵥᵢᵢ | | |
| 111 | AlkLEᵢᵢ | EᵥᵢEᵥᵢᵢ | | |
| 112 | AlkLEᵢᵢE_{iib} | EᵥᵢEᵥᵢᵢ | | |
| 113 | AlkLEᵢᵢᵢ | EᵥᵢEᵥᵢᵢ | | |
| 114 | AlkLEᵢᵥ | EᵥᵢEᵥᵢᵢ | | |
| 115 | AlkL | EᵥᵢEᵥᵢᵢ | Eₐ | |
| 116 | AlkLEᵢ | EᵥᵢEᵥᵢᵢ | Eₐ | |
| 117 | AlkLEᵢᵢ | EᵥᵢEᵥᵢᵢ | Eₐ | |
| 118 | AlkLEᵢᵢE_{iib} | EᵥᵢEᵥᵢᵢ | Eₐ | |
| 119 | AlkLEᵢᵢᵢ | EᵥᵢEᵥᵢᵢ | Eₐ | |
| 120 | AlkLEᵢᵥ | EᵥᵢEᵥᵢᵢ | Eₐ | |
| 121 | AlkL | EᵥᵢEᵥᵢᵢ | E_{b} | |
| 122 | AlkLEᵢ | EᵥᵢEᵥᵢᵢ | E_{b} | |
| 123 | AlkLEᵢᵢ | EᵥᵢEᵥᵢᵢ | E_{b} | |
| 124 | AlkLEᵢᵢE_{iib} | EᵥᵢEᵥᵢᵢ | E_{b} | |
| 125 | AlkLEᵢᵢᵢ | EᵥᵢEᵥᵢᵢ | E_{b} | |
| 126 | AlkLEᵢᵥ | EᵥᵢEᵥᵢᵢ | E_{b} | |
| 127 | AlkL | EᵥᵢEᵥᵢᵢ | E_{d} | |
| 128 | AlkLEᵢ | EᵥᵢEᵥᵢᵢ | E_{d} | |
| 129 | AlkLEᵢᵢ | EᵥᵢEᵥᵢᵢ | E_{d} | |
| 130 | AlkLEᵢᵢE_{iib} | EᵥᵢEᵥᵢᵢ | E_{d} | |
| 131 | AlkLEᵢᵢᵢ | EᵥᵢEᵥᵢᵢ | E_{d} | |
| 132 | AlkLEᵢᵥ | EᵥᵢEᵥᵢᵢ | E_{d} | |
| 133 | AlkL | EᵥᵢEᵥᵢᵢ | Eₑ | |
| 134 | AlkLEᵢ | EᵥᵢEᵥᵢᵢ | Eₑ | |
| 135 | AlkLEᵢᵢ | EᵥᵢEᵥᵢᵢ | Eₑ | |
| 136 | AlkLEᵢᵢE_{iib} | EᵥᵢEᵥᵢᵢ | Eₑ | |
| 137 | AlkLEᵢᵢᵢ | EᵥᵢEᵥᵢᵢ | Eₑ | |
| 138 | AlkLEᵢᵥ | EᵥᵢEᵥᵢᵢ | Eₑ | |
| 139 | AlkL | EᵥᵢEᵥᵢᵢ | E_{f} | |
| 140 | AlkLEᵢ | EᵥᵢEᵥᵢᵢ | E_{f} | |
| 141 | AlkLEᵢᵢ | EᵥᵢEᵥᵢᵢ | E_{f} | |
| 142 | AlkLEᵢᵢE_{iib} | EᵥᵢEᵥᵢᵢ | E_{f} | |
| 143 | AlkLEᵢᵢᵢ | EᵥᵢEᵥᵢᵢ | E_{f} | |
| 144 | AlkLEᵢᵥ | EᵥᵢEᵥᵢᵢ | E_{f} | |
| 145 | AlkL | E_{iib}EᵥᵢEᵥᵢᵢ | | |
| 146 | AlkLEᵢ | E_{iib}EᵥᵢEᵥᵢᵢ | | |
| 147 | AlkLEᵢᵢ | E_{iib}EᵥᵢEᵥᵢᵢ | | |
| 148 | AlkLEᵢᵢE_{iib} | E_{iib}EᵥᵢEᵥᵢᵢ | | |
| 149 | AlkLEᵢᵢᵢ | E_{iib}EᵥᵢEᵥᵢᵢ | | |
| 150 | AlkLEᵢᵥ | E_{iib}EᵥᵢEᵥᵢᵢ | | |
| 151 | AlkL | E_{iib}EᵥᵢEᵥᵢᵢ | Eₐ | |
| 152 | AlkLEᵢ | E_{iib}EᵥᵢEᵥᵢᵢ | Eₐ | |
| 153 | AlkLEᵢᵢ | E_{iib}EᵥᵢEᵥᵢᵢ | Eₐ | |
| 154 | AlkLEᵢᵢE_{iib} | E_{iib}EᵥᵢEᵥᵢᵢ | Eₐ | |
| 155 | AlkLEᵢᵢᵢ | E_{iib}EᵥᵢEᵥᵢᵢ | Eₐ | |
| 156 | AlkLEᵢᵥ | E_{iib}EᵥᵢEᵥᵢᵢ | Eₐ | |
| 157 | AlkL | E_{iib}EᵥᵢEᵥᵢᵢ | E_{b} | |
| 158 | AlkLEᵢ | E_{iib}EᵥᵢEᵥᵢᵢ | E_{b} | |
| 159 | AlkLEᵢᵢ | E_{iib}EᵥᵢEᵥᵢᵢ | E_{b} | |
| 160 | AlkLEᵢᵢE_{iib} | E_{iib}EᵥᵢEᵥᵢᵢ | E_{b} | |
| 161 | AlkLEᵢᵢᵢ | E_{iib}EᵥᵢEᵥᵢᵢ | E_{b} | |
| 162 | AlkLEᵢᵥ | E_{iib}EᵥᵢEᵥᵢᵢ | E_{b} | |
| 163 | AlkL | E_{iib}EᵥᵢEᵥᵢᵢ | E_{d} | |
| 164 | AlkLEᵢ | E_{iib}EᵥᵢEᵥᵢᵢ | E_{d} | |
| 165 | AlkLEᵢᵢ | E_{iib}EᵥᵢEᵥᵢᵢ | E_{d} | |
| 166 | AlkLEᵢᵢE_{iib} | E_{iib}EᵥᵢEᵥᵢᵢ | E_{d} | |
| 167 | AlkLEᵢᵢᵢ | E_{iib}EᵥᵢEᵥᵢᵢ | E_{d} | |
| 168 | AlkLEᵢᵥ | E_{iib}EᵥᵢEᵥᵢᵢ | E_{d} | |
| 169 | AlkL | E_{iib}EᵥᵢEᵥᵢᵢ | Eₑ | |
| 170 | AlkLEᵢ | E_{iib}EᵥᵢEᵥᵢᵢ | Eₑ | |
| 171 | AlkLEᵢᵢ | E_{iib}EᵥᵢEᵥᵢᵢ | Eₑ | |
| 172 | AlkLEᵢᵢE_{iib} | E_{iib}EᵥᵢEᵥᵢᵢ | Eₑ | |
| 173 | AlkLEᵢᵢᵢ | E_{iib}EᵥᵢEᵥᵢᵢ | Eₑ | |
| 174 | AlkLEᵢᵥ | E_{iib}EᵥᵢEᵥᵢᵢ | Eₑ | |
| 175 | AlkL | E_{iib}EᵥᵢEᵥᵢᵢ | E_{f} | |
| 176 | AlkLEᵢ | E_{iib}EᵥᵢEᵥᵢᵢ | E_{f} | |
| 177 | AlkLEᵢᵢ | E_{iib}EᵥᵢEᵥᵢᵢ | E_{f} | |
| 178 | AlkLEᵢᵢE_{iib} | E_{iib}EᵥᵢEᵥᵢᵢ | E_{f} | |
| 179 | AlkLEᵢᵢᵢ | E_{iib}EᵥᵢEᵥᵢᵢ | E_{f} | |
| 180 | AlkLEᵢᵥ | E_{iib}EᵥᵢEᵥᵢᵢ | E_{f} | |
| 181 | AlkL | Eᵥ | | E₁ |
| 182 | AlkLEᵢ | Eᵥ | | E₁ |
| 183 | AlkLEᵢᵢ | Eᵥ | | E₁ |
| 184 | AlkLEᵢᵢE_{iib} | Eᵥ | | E₁ |
| 185 | AlkLEᵢᵢᵢ | Eᵥ | | E₁ |
| 186 | AlkLEᵢᵥ | Eᵥ | | E₁ |
| 187 | AlkL | Eᵥ | Eₐ | E₁ |
| 188 | AlkLEᵢ | Eᵥ | Eₐ | E₁ |
| 189 | AlkLEᵢᵢ | Eᵥ | Eₐ | E₁ |
| 190 | AlkLEᵢᵢE_{iib} | Eᵥ | Eₐ | E₁ |
| 191 | AlkLEᵢᵢᵢ | Eᵥ | Eₐ | E₁ |
| 192 | AlkLEᵢᵥ | Eᵥ | Eₐ | E₁ |
| 193 | AlkL | Eᵥ | E_{b} | E₁ |
| 194 | AlkLEᵢ | Eᵥ | E_{b} | E₁ |
| 195 | AlkLEᵢᵢ | Eᵥ | E_{b} | E₁ |
| 196 | AlkLEᵢᵢE_{iib} | Eᵥ | E_{b} | E₁ |
| 197 | AlkLEᵢᵢᵢ | Eᵥ | E_{b} | E₁ |
| 198 | AlkLEᵢᵥ | Eᵥ | E_{b} | E₁ |
| 199 | AlkL | Eᵥ | E_{d} | E₁ |
| 200 | AlkLEᵢ | Eᵥ | E_{d} | E₁ |
| 201 | AlkLEᵢᵢ | Eᵥ | E_{d} | E₁ |
| 202 | AlkLEᵢᵢE_{iib} | Eᵥ | E_{d} | E₁ |
| 203 | AlkLEᵢᵢᵢ | Eᵥ | E_{d} | E₁ |
| 204 | AlkLEᵢᵥ | Eᵥ | E_{d} | E₁ |
| 205 | AlkL | Eᵥ | Eₑ | E₁ |
| 206 | AlkLEᵢ | Eᵥ | Eₑ | E₁ |
| 207 | AlkLEᵢᵢ | Eᵥ | Eₑ | E₁ |
| 208 | AlkLEᵢᵢE_{iib} | Eᵥ | Eₑ | E₁ |
| 209 | AlkLEᵢᵢᵢ | Eᵥ | Eₑ | E₁ |
| 210 | AlkLEᵢᵥ | Eᵥ | Eₑ | E₁ |
| 211 | AlkL | Eᵥ | E_{f} | E₁ |
| 212 | AlkLEᵢ | Eᵥ | E_{f} | E₁ |
| 213 | AlkLEᵢᵢ | Eᵥ | E_{f} | E₁ |
| 214 | AlkLEᵢᵢE_{iib} | Eᵥ | E_{f} | E₁ |
| 215 | AlkLEᵢᵢᵢ | Eᵥ | E_{f} | E₁ |
| 216 | AlkLEᵢᵥ | Eᵥ | E_{f} | E₁ |
| 217 | AlkL | EᵥEᵥᵢ | | E₁ |
| 218 | AlkLEᵢ | EᵥEᵥᵢ | | E₁ |
| 219 | AlkLEᵢᵢ | EᵥEᵥᵢ | | E₁ |
| 220 | AlkLEᵢᵢE_{iib} | EᵥEᵥᵢ | | E₁ |
| 221 | AlkLEᵢᵢᵢ | EᵥEᵥᵢ | | E₁ |
| 222 | AlkLEᵢᵥ | EᵥEᵥᵢ | | E₁ |
| 223 | AlkL | EᵥEᵥᵢ | Eₐ | E₁ |
| 224 | AlkLEᵢ | EᵥEᵥᵢ | Eₐ | E₁ |
| 225 | AlkLEᵢᵢ | EᵥEᵥᵢ | Eₐ | E₁ |
| 226 | AlkLEᵢᵢE_{iib} | EᵥEᵥᵢ | Eₐ | E₁ |
| 227 | AlkLEᵢᵢᵢ | EᵥEᵥᵢ | Eₐ | E₁ |
| 228 | AlkLEᵢᵥ | EᵥEᵥᵢ | Eₐ | E₁ |
| 229 | AlkL | EᵥEᵥᵢ | E_{b} | E₁ |
| 230 | AlkLEᵢ | EᵥEᵥᵢ | E_{b} | E₁ |
| 231 | AlkLEᵢᵢ | EᵥEᵥᵢ | E_{b} | E₁ |
| 232 | AlkLEᵢᵢE_{iib} | EᵥEᵥᵢ | E_{b} | E₁ |
| 233 | AlkLEᵢᵢᵢ | EᵥEᵥᵢ | E_{b} | E₁ |
| 234 | AlkLEᵢᵥ | EᵥEᵥᵢ | E_{b} | E₁ |
| 235 | AlkL | EᵥEᵥᵢ | E_{d} | E₁ |
| 236 | AlkLEᵢ | EᵥEᵥᵢ | E_{d} | E₁ |
| 237 | AlkLEᵢᵢ | EᵥEᵥᵢ | E_{d} | E₁ |
| 238 | AlkLEᵢᵢE_{iib} | EᵥEᵥᵢ | E_{d} | E₁ |
| 239 | AlkLEᵢᵢᵢ | EᵥEᵥᵢ | E_{d} | E₁ |
| 240 | AlkLEᵢᵥ | EᵥEᵥᵢ | E_{d} | E₁ |
| 241 | AlkL | EᵥEᵥᵢ | Eₑ | E₁ |
| 242 | AlkLEᵢ | EᵥEᵥᵢ | Eₑ | E₁ |
| 243 | AlkLEᵢᵢ | EᵥEᵥᵢ | Eₑ | E₁ |
| 244 | AlkLEᵢᵢE_{iib} | EᵥEᵥᵢ | Eₑ | E₁ |
| 245 | AlkLEᵢᵢᵢ | EᵥEᵥᵢ | Eₑ | E₁ |
| 246 | AlkLEᵢᵥ | EᵥEᵥᵢ | Eₑ | E₁ |
| 247 | AlkL | EᵥEᵥᵢ | E_{f} | E₁ |
| 248 | AlkLEᵢ | EᵥEᵥᵢ | E_{f} | E₁ |
| 249 | AlkLEᵢᵢ | EᵥEᵥᵢ | E_{f} | E₁ |
| 250 | AlkLEᵢᵢE_{iib} | EᵥEᵥᵢ | E_{f} | E₁ |
| 251 | AlkLEᵢᵢᵢ | EᵥEᵥᵢ | E_{f} | E₁ |
| 252 | AlkLEᵢᵥ | EᵥEᵥᵢ | E_{f} | E₁ |
| 253 | AlkL | Eᵥᵢᵢ | | E₁ |
| 254 | AlkLEᵢ | Eᵥᵢᵢ | | E₁ |
| 255 | AlkLEᵢᵢ | Eᵥᵢᵢ | | E₁ |
| 256 | AlkLEᵢᵢE_{iib} | Eᵥᵢᵢ | | E₁ |
| 257 | AlkLEᵢᵢᵢ | Eᵥᵢᵢ | | E₁ |
| 258 | AlkLEᵢᵥ | Eᵥᵢᵢ | | E₁ |
| 259 | AlkL | Eᵥᵢᵢ | Eₐ | E₁ |
| 260 | AlkLEᵢ | Eᵥᵢᵢ | Eₐ | E₁ |
| 261 | AlkLEᵢᵢ | Eᵥᵢᵢ | Eₐ | E₁ |
| 262 | AlkLEᵢᵢE_{iib} | Eᵥᵢᵢ | Eₐ | E₁ |
| 263 | AlkLEᵢᵢᵢ | Eᵥᵢᵢ | Eₐ | E₁ |
| 264 | AlkLEᵢᵥ | Eᵥᵢᵢ | Eₐ | E₁ |
| 265 | AlkL | Eᵥᵢᵢ | E_{b} | E₁ |
| 266 | AlkLEᵢ | Eᵥᵢᵢ | E_{b} | E₁ |
| 267 | AlkLEᵢᵢ | Eᵥᵢᵢ | E_{b} | E₁ |
| 268 | AlkLEᵢᵢE_{iib} | Eᵥᵢᵢ | E_{b} | E₁ |
| 269 | AlkLEᵢᵢᵢ | Eᵥᵢᵢ | E_{b} | E₁ |
| 270 | AlkLEᵢᵥ | Eᵥᵢᵢ | E_{b} | E₁ |
| 271 | AlkL | Eᵥᵢᵢ | E_{d} | E₁ |
| 272 | AlkLEᵢ | Eᵥᵢᵢ | E_{d} | E₁ |
| 273 | AlkLEᵢᵢ | Eᵥᵢᵢ | E_{d} | E₁ |
| 274 | AlkLEᵢᵢE_{iib} | Eᵥᵢᵢ | E_{d} | E₁ |
| 275 | AlkLEᵢᵢᵢ | Eᵥᵢᵢ | E_{d} | E₁ |
| 276 | AlkLEᵢᵥ | Eᵥᵢᵢ | E_{d} | E₁ |
| 277 | AlkL | Eᵥᵢᵢ | Eₑ | E₁ |
| 278 | AlkLEᵢ | Eᵥᵢᵢ | Eₑ | E₁ |
| 279 | AlkLEᵢᵢ | Eᵥᵢᵢ | Eₑ | E₁ |
| 280 | AlkLEᵢᵢE_{iib} | Eᵥᵢᵢ | Eₑ | E₁ |
| 281 | AlkLEᵢᵢᵢ | Eᵥᵢᵢ | Eₑ | E₁ |
| 282 | AlkLEᵢᵥ | Eᵥᵢᵢ | Eₑ | E₁ |
| 283 | AlkL | Eᵥᵢᵢ | E_{f} | E₁ |
| 284 | AlkLEᵢ | Eᵥᵢᵢ | E_{f} | E₁ |
| 285 | AlkLEᵢᵢ | Eᵥᵢᵢ | E_{f} | E₁ |
| 286 | AlkLEᵢᵢE_{iib} | Eᵥᵢᵢ | E_{f} | E₁ |
| 287 | AlkLEᵢᵢᵢ | Eᵥᵢᵢ | E_{f} | E₁ |
| 288 | AlkLEᵢᵥ | Eᵥᵢᵢ | E_{f} | E₁ |
| 289 | AlkL | EᵥᵢEᵥᵢᵢ | | E₁ |
| 290 | AlkLEᵢ | EᵥᵢEᵥᵢᵢ | | E₁ |
| 291 | AlkLEᵢᵢ | EᵥᵢEᵥᵢᵢ | | E₁ |
| 292 | AlkLEᵢᵢE_{iib} | EᵥᵢEᵥᵢᵢ | | E₁ |
| 293 | AlkLEᵢᵢᵢ | EᵥᵢEᵥᵢᵢ | | E₁ |
| 294 | AlkLEᵢᵥ | EᵥᵢEᵥᵢᵢ | | E₁ |
| 295 | AlkL | EᵥᵢEᵥᵢᵢ | Eₐ | E₁ |
| 296 | AlkLEᵢ | EᵥᵢEᵥᵢᵢ | Eₐ | E₁ |
| 297 | AlkLEᵢᵢ | EᵥᵢEᵥᵢᵢ | Eₐ | E₁ |
| 298 | AlkLEᵢᵢE_{iib} | EᵥᵢEᵥᵢᵢ | Eₐ | E₁ |
| 299 | AlkLEᵢᵢᵢ | EᵥᵢEᵥᵢᵢ | Eₐ | E₁ |
| 300 | AlkLEᵢᵥ | EᵥᵢEᵥᵢᵢ | Eₐ | E₁ |
| 301 | AlkL | EᵥᵢEᵥᵢᵢ | E_{b} | E₁ |
| 302 | AlkLEᵢ | EᵥᵢEᵥᵢᵢ | E_{b} | E₁ |
| 303 | AlkLEᵢᵢ | EᵥᵢEᵥᵢᵢ | E_{b} | E₁ |
| 304 | AlkLEᵢᵢE_{iib} | EᵥᵢEᵥᵢᵢ | E_{b} | E₁ |
| 305 | AlkLEᵢᵢᵢ | EᵥᵢEᵥᵢᵢ | E_{b} | E₁ |
| 306 | AlkLEᵢᵥ | EᵥᵢEᵥᵢᵢ | E_{b} | E₁ |
| 307 | AlkL | EᵥᵢEᵥᵢᵢ | E_{d} | E₁ |
| 308 | AlkLEᵢ | EᵥᵢEᵥᵢᵢ | E_{d} | E₁ |
| 309 | AlkLEᵢᵢ | EᵥᵢEᵥᵢᵢ | E_{d} | E₁ |
| 310 | AlkLEᵢᵢE_{iib} | EᵥᵢEᵥᵢᵢ | E_{d} | E₁ |
| 311 | AlkLEᵢᵢᵢ | EᵥᵢEᵥᵢᵢ | E_{d} | E₁ |
| 312 | AlkLEᵢᵥ | EᵥᵢEᵥᵢᵢ | E_{d} | E₁ |
| 313 | AlkL | EᵥᵢEᵥᵢᵢ | Eₑ | E₁ |
| 314 | AlkLEᵢ | EᵥᵢEᵥᵢᵢ | Eₑ | E₁ |
| 315 | AlkLEᵢᵢ | EᵥᵢEᵥᵢᵢ | Eₑ | E₁ |
| 316 | AlkLEᵢᵢE_{iib} | EᵥᵢEᵥᵢᵢ | Eₑ | E₁ |
| 317 | AlkLEᵢᵢᵢ | EᵥᵢEᵥᵢᵢ | Eₑ | E₁ |
| 318 | AlkLEᵢᵥ | EᵥᵢEᵥᵢᵢ | Eₑ | E₁ |
| 319 | AlkL | EᵥᵢEᵥᵢᵢ | E_{f} | E₁ |
| 320 | AlkLEᵢ | EᵥᵢEᵥᵢᵢ | E_{f} | E₁ |
| 321 | AlkLEᵢᵢ | EᵥᵢEᵥᵢᵢ | E_{f} | E₁ |
| 322 | AlkLEᵢᵢE_{iib} | EᵥᵢEᵥᵢᵢ | E_{f} | E₁ |
| 323 | AlkLEᵢᵢᵢ | EᵥᵢEᵥᵢᵢ | E_{f} | E₁ |
| 324 | AlkLEᵢᵥ | EᵥᵢEᵥᵢᵢ | E_{f} | E₁ |
| 325 | AlkL | E_{iib}EᵥᵢEᵥᵢᵢ | | E₁ |
| 326 | AlkLEᵢ | E_{iib}EᵥᵢEᵥᵢᵢ | | E₁ |
| 327 | AlkLEᵢᵢ | E_{iib}EᵥᵢEᵥᵢᵢ | | E₁ |
| 328 | AlkLEᵢᵢE_{iib} | E_{iib}EᵥᵢEᵥᵢᵢ | | E₁ |
| 329 | AlkLEᵢᵢᵢ | E_{iib}EᵥᵢEᵥᵢᵢ | | E₁ |
| 330 | AlkLEᵢᵥ | E_{iib}EᵥᵢEᵥᵢᵢ | | E₁ |
| 331 | AlkL | E_{iib}EᵥᵢEᵥᵢᵢ | Eₐ | E₁ |
| 332 | AlkLEᵢ | E_{iib}EᵥᵢEᵥᵢᵢ | Eₐ | E₁ |
| 333 | AlkLEᵢᵢ | E_{iib}EᵥᵢEᵥᵢᵢ | Eₐ | E₁ |
| 334 | AlkLEᵢᵢE_{iib} | E_{iib}EᵥᵢEᵥᵢᵢ | Eₐ | E₁ |
| 335 | AlkLEᵢᵢᵢ | E_{iib}EᵥᵢEᵥᵢᵢ | Eₐ | E₁ |
| 336 | AlkLEᵢᵥ | E_{iib}EᵥᵢEᵥᵢᵢ | Eₐ | E₁ |
| 337 | AlkL | E_{iib}EᵥᵢEᵥᵢᵢ | E_{b} | E₁ |
| 338 | AlkLEᵢ | E_{iib}EᵥᵢEᵥᵢᵢ | E_{b} | E₁ |
| 339 | AlkLEᵢᵢ | E_{iib}EᵥᵢEᵥᵢᵢ | E_{b} | E₁ |
| 340 | AlkLEᵢᵢE_{iib} | E_{iib}EᵥᵢEᵥᵢᵢ | E_{b} | E₁ |
| 341 | AlkLEᵢᵢᵢ | E_{iib}EᵥᵢEᵥᵢᵢ | E_{b} | E₁ |
| 342 | AlkLEᵢᵥ | E_{iib}EᵥᵢEᵥᵢᵢ | E_{b} | E₁ |
| 343 | AlkL | E_{iib}EᵥᵢEᵥᵢᵢ | E_{d} | E₁ |
| 344 | AlkLEᵢ | E_{iib}EᵥᵢEᵥᵢᵢ | E_{d} | E₁ |
| 345 | AlkLEᵢᵢ | E_{iib}EᵥᵢEᵥᵢᵢ | E_{d} | E₁ |
| 346 | AlkLEᵢᵢE_{iib} | E_{iib}EᵥᵢEᵥᵢᵢ | E_{d} | E₁ |
| 347 | AlkLEᵢᵢᵢ | E_{iib}EᵥᵢEᵥᵢᵢ | E_{d} | E₁ |
| 348 | AlkLEᵢᵥ | E_{iib}EᵥᵢEᵥᵢᵢ | E_{d} | E₁ |
| 349 | AlkL | E_{iib}EᵥᵢEᵥᵢᵢ | Eₑ | E₁ |
| 350 | AlkLEᵢ | E_{iib}EᵥᵢEᵥᵢᵢ | Eₑ | E₁ |
| 351 | AlkLEᵢᵢ | E_{iib}EᵥᵢEᵥᵢᵢ | Eₑ | E₁ |
| 352 | AlkLEᵢᵢE_{iib} | E_{iib}EᵥᵢEᵥᵢᵢ | Eₑ | E₁ |
| 353 | AlkLEᵢᵢᵢ | E_{iib}EᵥᵢEᵥᵢᵢ | Eₑ | E₁ |
| 354 | AlkLEᵢᵥ | E_{iib}EᵥᵢEᵥᵢᵢ | Eₑ | E₁ |
| 355 | AlkL | E_{iib}EᵥᵢEᵥᵢᵢ | E_{f} | E₁ |
| 356 | AlkLEᵢ | E_{iib}EᵥᵢEᵥᵢᵢ | E_{f} | E₁ |
| 357 | AlkLEᵢᵢ | E_{iib}EᵥᵢEᵥᵢᵢ | E_{f} | E₁ |
| 358 | AlkLEᵢᵢE_{iib} | E_{iib}EᵥᵢEᵥᵢᵢ | E_{f} | E₁ |
| 359 | AlkLEᵢᵢᵢ | E_{iib}EᵥᵢEᵥᵢᵢ | E_{f} | E₁ |
| 360 | AlkLEᵢᵥ | E_{iib}EᵥᵢEᵥᵢᵢ | E_{f} | E₁ |

[0191] Microorganisms (abbreviated to MO) which are very especially preferred according to the invention are outstandingly suitable for the production of alkan-1-ols and alkan-1-als and have increased or reduced enzymatic activities (abbreviated to E) which are described in the table hereinbelow, it being possible for these enzymatic activities additionally to be advantageously combined with an enzymatic activity described for the 3-ketoacyl-ACP (acyl carrier protein) synthase III (EC 2.3.1.41), which enzymatic activity is increased in comparison with the wild type of the microorganism, in particular the enzymatic activity of plants, preferably the enzymatic activity of plants whose seeds contain fatty acids with alkyl residues shorter than 14 C atoms and especially preferably the enzymatic activity of plants of the genera Cuphea, Elaeis, Cocos, Umbellularia and Cinnamomum and gene products selected from among AccA, AccB, AccC, AccD, AceE, AceF, Lpd, AcpP, FabA, FabB, FabD, FabF, FabG, FabH, FabI, FabZ, PanD, PanK, UdhA, PntA or PntB.

[0192] Any desired combinations of at least two of these enzymatic activities may advantageously be increased.

[0193] It may be additionally advantageous that the microorganism is equipped with an enzymatic activity which is described for the gene products selected from among TdcE, PflA, PflB, PflC, PflD, PoxB, YgfG, AckA, AckB, TdcD, Pta, LdhA, AdhE, MgsA, FdnG, FdnH, FdnI, FdhF, FdoG, FdoH, FdoI, PrpC, PrpD, PrpF, PrpB, TdcD, Pdc, PorA, PorB, PorC, PorD, AlsS, IlvB, IlvM, IlvN, IlvG, IlyI, IlvH, AlsD, ButB, Thl, ThlA, ThlB, PhaA, PhaB, Crt, BdhA, BdhB, Adc, Adh, CtfB, AtoA, AtoD, LdhL, GltA, FabR, FhuA, Dld, LldA or LldP, individually or in any desired combination, and which is reduced in comparison with the wild type of the microorganism.

| | | |
|---|---|---|
| MO | Increased E | Reduced E |

| | | | | |
|---|---|---|---|---|
| 1 | AlkL | Eᵥᵢᵢᵢ | | |
| 2 | AlkLEᵢ | Eᵥᵢᵢᵢ | | |
| 3 | AlkLEᵢᵢ | Eᵥᵢᵢᵢ | | |
| 4 | AlkLEᵢᵢE_{iib} | Eᵥᵢᵢᵢ | | |
| 5 | AlkLEᵢᵢᵢ | Eᵥᵢᵢᵢ | | |
| 6 | AlkLEᵢᵥ | Eᵥᵢᵢᵢ | | |
| 7 | AlkL | Eᵥᵢᵢᵢ | Eₐ | |
| 8 | AlkLEᵢ | Eᵥᵢᵢᵢ | Eₐ | |
| 9 | AlkLEᵢᵢ | Eᵥᵢᵢᵢ | Eₐ | |
| 10 | AlkLEᵢᵢE_{iib} | Eᵥᵢᵢᵢ | Eₐ | |
| 11 | AlkLEᵢᵢᵢ | Eᵥᵢᵢᵢ | Eₐ | |
| 12 | AlkLEᵢᵥ | Eᵥᵢᵢᵢ | Eₐ | |
| 13 | AlkL | Eᵥᵢᵢᵢ | E_{b} | |
| 14 | AlkLEᵢ | Eᵥᵢᵢᵢ | E_{b} | |
| 15 | AlkLEᵢᵢ | Eᵥᵢᵢᵢ | E_{b} | |
| 16 | AlkLEᵢᵢE_{iib} | Eᵥᵢᵢᵢ | E_{b} | |
| 17 | AlkLEᵢᵢᵢ | Eᵥᵢᵢᵢ | E_{b} | |
| 18 | AlkLEᵢᵥ | Eᵥᵢᵢᵢ | E_{b} | |
| 19 | AlkL | Eᵥᵢᵢᵢ | E_{d} | |
| 20 | AlkLEᵢ | Eᵥᵢᵢᵢ | E_{d} | |
| 21 | AlkLEᵢᵢ | Eᵥᵢᵢᵢ | E_{d} | |
| 22 | AlkLEᵢᵢE_{iib} | Eᵥᵢᵢᵢ | E_{d} | |
| 23 | AlkLEᵢᵢᵢ | Eᵥᵢᵢᵢ | E_{d} | |
| 24 | AlkLEᵢᵥ | Eᵥᵢᵢᵢ | E_{d} | |
| 25 | AlkL | Eᵥᵢᵢᵢ | Eₑ | |
| 26 | AlkLEᵢ | Eᵥᵢᵢᵢ | Eₑ | |
| 27 | AlkLEᵢᵢ | Eᵥᵢᵢᵢ | Eₑ | |
| 28 | AlkLEᵢᵢE_{iib} | Eᵥᵢᵢᵢ | Eₑ | |
| 29 | AlkLEᵢᵢᵢ | Eᵥᵢᵢᵢ | Eₑ | |
| 30 | AlkLEᵢᵥ | Eᵥᵢᵢᵢ | Eₑ | |
| 31 | AlkL | Eᵥᵢᵢᵢ | E_{f} | |
| 32 | AlkLEᵢ | Eᵥᵢᵢᵢ | E_{f} | |
| 33 | AlkLEᵢᵢ | Eᵥᵢᵢᵢ | E_{f} | |
| 34 | AlkLEᵢᵢE_{iib} | Eᵥᵢᵢᵢ | E_{f} | |
| 35 | AlkLEᵢᵢᵢ | Eᵥᵢᵢᵢ | E_{f} | |
| 36 | AlkLEᵢᵥ | Eᵥᵢᵢᵢ | E_{f} | |
| 37 | AlkL | Eᵢₓ | | |
| 38 | AlkLEᵢ | Eᵢₓ | | |
| 39 | AlkLEᵢᵢ | Eᵢₓ | | |
| 40 | AlkLEᵢᵢE_{iib} | Eᵢₓ | | |
| 41 | AlkLEᵢᵢᵢ | Eᵢₓ | | |
| 42 | AlkLEᵢᵥ | Eᵢₓ | | |
| 43 | AlkL | Eᵢₓ | Eₐ | |
| 44 | AlkLEᵢ | Eᵢₓ | Eₐ | |
| 45 | AlkLEᵢᵢ | Eᵢₓ | Eₐ | |
| 46 | AlkLEᵢᵢE_{iib} | Eᵢₓ | Eₐ | |
| 47 | AlkLEᵢᵢᵢ | Eᵢₓ | Eₐ | |
| 48 | AlkLEᵢᵥ | Eᵢₓ | Eₐ | |
| 49 | AlkL | Eᵢₓ | E_{b} | |
| 50 | AlkLEᵢ | Eᵢₓ | E_{b} | |
| 51 | AlkLEᵢᵢ | Eᵢₓ | E_{b} | |
| 52 | AlkLEᵢᵢE_{iib} | Eᵢₓ | E_{b} | |
| 53 | AlkLEᵢᵢᵢ | Eᵢₓ | E_{b} | |
| 54 | AlkLEᵢᵥ | Eᵢₓ | E_{b} | |
| 55 | AlkL | Eᵢₓ | E_{d} | |
| 56 | AlkLEᵢ | Eᵢₓ | E_{d} | |
| 57 | AlkLEᵢᵢ | Eᵢₓ | E_{d} | |
| 58 | AlkLEᵢᵢE_{iib} | Eᵢₓ | E_{d} | |
| 59 | AlkLEᵢᵢᵢ | Eᵢₓ | E_{d} | |
| 60 | AlkLEᵢᵥ | Eᵢₓ | E_{d} | |
| 61 | AlkL | Eᵢₓ | Eₑ | |
| 62 | AlkLEᵢ | Eᵢₓ | Eₑ | |
| 63 | AlkLEᵢᵢ | Eᵢₓ | Eₑ | |
| 64 | AlkLEᵢᵢE_{iib} | Eᵢₓ | Eₑ | |
| 65 | AlkLEᵢᵢᵢ | Eᵢₓ | Eₑ | |
| 66 | AlkLEᵢᵥ | Eᵢₓ | Eₑ | |
| 67 | AlkL | Eᵢₓ | E_{f} | |
| 68 | AlkLEᵢ | Eᵢₓ | E_{f} | |
| 69 | AlkLEᵢᵢ | Eᵢₓ | E_{f} | |
| 70 | AlkLEᵢᵢE_{iib} | Eᵢₓ | E_{f} | |
| 71 | AlkLEᵢᵢᵢ | Eᵢₓ | E_{f} | |
| 72 | AlkLEᵢᵥ | Eᵢₓ | E_{f} | |
| 73 | AlkL | Eₓ | | |
| 74 | AlkLEᵢ | Eₓ | | |
| 75 | AlkLEᵢᵢ | Eₓ | | |
| 76 | AlkLEᵢᵢE_{iib} | Eₓ | | |
| 77 | AlkLEᵢᵢᵢ | Eₓ | | |
| 78 | AlkLEᵢᵥ | Eₓ | | |
| 79 | AlkL | Eₓ | Eₐ | |
| 80 | AlkLEᵢ | Eₓ | Eₐ | |
| 81 | AlkLEᵢᵢ | Eₓ | Eₐ | |
| 82 | AlkLEᵢᵢE_{iib} | Eₓ | Eₐ | |
| 83 | AlkLEᵢᵢᵢ | Eₓ | Eₐ | |
| 84 | AlkLEᵢᵥ | Eₓ | Eₐ | |
| 85 | AlkL | Eₓ | E_{b} | |
| 86 | AlkLEᵢ | Eₓ | E_{b} | |
| 87 | AlkLEᵢᵢ | Eₓ | E_{b} | |
| 88 | AlkLEᵢᵢE_{iib} | Eₓ | E_{b} | |
| 89 | AlkLEᵢᵢᵢ | Eₓ | E_{b} | |
| 90 | AlkLEᵢᵥ | Eₓ | E_{b} | |
| 91 | AlkL | Eₓ | E_{d} | |
| 92 | AlkLEᵢ | Eₓ | E_{d} | |
| 93 | AlkLEᵢᵢ | Eₓ | E_{d} | |
| 94 | AlkLEᵢᵢE_{iib} | Eₓ | E_{d} | |
| 95 | AlkLEᵢᵢᵢ | Eₓ | E_{d} | |
| 96 | AlkLEᵢᵥ | Eₓ | E_{d} | |
| 97 | AlkL | Eₓ | Eₑ | |
| 98 | AlkLEᵢ | Eₓ | Eₑ | |
| 99 | AlkLEᵢᵢ | Eₓ | Eₑ | |
| 100 | AlkLEᵢᵢE_{iib} | Eₓ | Eₑ | |
| 101 | AlkLEᵢᵢᵢ | Eₓ | Eₑ | |
| 102 | AlkLEᵢᵥ | Eₓ | Eₑ | |
| 103 | AlkL | Eₓ | E_{f} | |
| 104 | AlkLEᵢ | Eₓ | E_{f} | |
| 105 | AlkLEᵢᵢ | Eₓ | E_{f} | |
| 106 | AlkLEᵢᵢE_{iib} | Eₓ | E_{f} | |
| 107 | AlkLEᵢᵢᵢ | Eₓ | E_{f} | |
| 108 | AlkLEᵢᵥ | Eₓ | E_{f} | |
| 109 | AlkL | EᵥᵢEᵥᵢᵢᵢ | | |
| 110 | AlkLEᵢ | EᵥᵢEᵥᵢᵢᵢ | | |
| 111 | AlkLEᵢᵢ | EᵥᵢEᵥᵢᵢᵢ | | |
| 112 | AlkLEᵢᵢE_{iib} | EᵥᵢEᵥᵢᵢᵢ | | |
| 113 | AlkLEᵢᵢᵢ | EᵥᵢEᵥᵢᵢᵢ | | |
| 114 | AlkLEᵢᵥ | EᵥᵢEᵥᵢᵢᵢ | | |
| 115 | AlkL | EᵥᵢEᵥᵢᵢᵢ | Eₐ | |
| 116 | AlkLEᵢ | EᵥᵢEᵥᵢᵢᵢ | Eₐ | |
| 117 | AlkLEᵢᵢ | EᵥᵢEᵥᵢᵢᵢ | Eₐ | |
| 118 | AlkLEᵢᵢE_{iib} | EᵥᵢEᵥᵢᵢᵢ | Eₐ | |
| 119 | AlkLEᵢᵢᵢ | EᵥᵢEᵥᵢᵢᵢ | Eₐ | |
| 120 | AlkLEᵢᵥ | EᵥᵢEᵥᵢᵢᵢ | Eₐ | |
| 121 | AlkL | EᵥᵢEᵥᵢᵢᵢ | E_{b} | |
| 122 | AlkLEᵢ | EᵥᵢEᵥᵢᵢᵢ | E_{b} | |
| 123 | AlkLEᵢᵢ | EᵥᵢEᵥᵢᵢᵢ | E_{b} | |
| 124 | AlkLEᵢᵢE_{iib} | EᵥᵢEᵥᵢᵢᵢ | E_{b} | |
| 125 | AlkLEᵢᵢᵢ | EᵥᵢEᵥᵢᵢᵢ | E_{b} | |
| 126 | AlkLEᵢᵥ | EᵥᵢEᵥᵢᵢᵢ | E_{b} | |
| 127 | AlkL | EᵥᵢEᵥᵢᵢᵢ | E_{d} | |
| 128 | AlkLEᵢ | EᵥᵢEᵥᵢᵢᵢ | E_{d} | |
| 129 | AlkLEᵢᵢ | EᵥᵢEᵥᵢᵢᵢ | E_{d} | |
| 130 | AlkLEᵢᵢE_{iib} | EᵥᵢEᵥᵢᵢᵢ | E_{d} | |
| 131 | AlkLEᵢᵢᵢ | EᵥᵢEᵥᵢᵢᵢ | E_{d} | |
| 132 | AlkLEᵢᵥ | EᵥᵢEᵥᵢᵢᵢ | E_{d} | |
| 133 | AlkL | EᵥᵢEᵥᵢᵢᵢ | Eₑ | |
| 134 | AlkLEᵢ | EᵥᵢEᵥᵢᵢᵢ | Eₑ | |
| 135 | AlkLEᵢᵢ | EᵥᵢEᵥᵢᵢᵢ | Eₑ | |
| 136 | AlkLEᵢᵢE_{iib} | EᵥᵢEᵥᵢᵢᵢ | Eₑ | |
| 137 | AlkLEᵢᵢᵢ | EᵥᵢEᵥᵢᵢᵢ | Eₑ | |
| 138 | AlkLEᵢᵥ | EᵥᵢEᵥᵢᵢᵢ | Eₑ | |
| 139 | AlkL | EᵥᵢEᵥᵢᵢᵢ | E_{f} | |
| 140 | AlkLEᵢ | EᵥᵢEᵥᵢᵢᵢ | E_{f} | |
| 141 | AlkLEᵢᵢ | EᵥᵢEᵥᵢᵢᵢ | E_{f} | |
| 142 | AlkLEᵢᵢE_{iib} | EᵥᵢEᵥᵢᵢᵢ | E_{f} | |
| 143 | AlkLEᵢᵢᵢ | EᵥᵢEᵥᵢᵢᵢ | E_{f} | |
| 144 | AlkLEᵢᵥ | EᵥᵢEᵥᵢᵢᵢ | E_{f} | |
| 145 | AlkL | E_{iib}EᵥᵢEₓ | | |
| 146 | AlkLEᵢ | E_{iib}EᵥᵢEₓ | | |
| 147 | AlkLEᵢᵢ | E_{iib}EᵥᵢEₓ | | |
| 148 | AlkLEᵢᵢE_{iib} | E_{iib}EᵥᵢEₓ | | |
| 149 | AlkLEᵢᵢᵢ | E_{iib}EᵥᵢEₓ | | |
| 150 | AlkLEᵢᵥ | E_{iib}EᵥᵢEₓ | | |
| 151 | AlkL | E_{iib}EᵥᵢEₓ | Eₐ | |
| 152 | AlkLEᵢ | E_{iib}EᵥᵢEₓ | Eₐ | |
| 153 | AlkLEᵢᵢ | E_{iib}EᵥᵢEₓ | Eₐ | |
| 154 | AlkLEᵢᵢE_{iib} | E_{iib}EᵥᵢEₓ | Eₐ | |
| 155 | AlkLEᵢᵢᵢ | E_{iib}EᵥᵢEₓ | Eₐ | |
| 156 | AlkLEᵢᵥ | E_{iib}EᵥᵢEₓ | Eₐ | |
| 157 | AlkL | E_{iib}EᵥᵢEₓ | E_{b} | |
| 158 | AlkLEᵢ | E_{iib}EᵥᵢEₓ | E_{b} | |
| 159 | AlkLEᵢᵢ | E_{iib}EᵥᵢEₓ | E_{b} | |
| 160 | AlkLEᵢᵢE_{iib} | E_{iib}EᵥᵢEₓ | E_{b} | |
| 161 | AlkLEᵢᵢᵢ | E_{iib}EᵥᵢEₓ | E_{b} | |
| 162 | AlkLEᵢᵥ | E_{iib}EᵥᵢEₓ | E_{b} | |
| 163 | AlkL | E_{iib}EᵥᵢEₓ | E_{d} | |
| 164 | AlkLEᵢ | E_{iib}EᵥᵢEₓ | E_{d} | |
| 165 | AlkLEᵢᵢ | E_{iib}EᵥᵢEₓ | E_{d} | |
| 166 | AlkLEᵢᵢE_{iib} | E_{iib}EᵥᵢEₓ | E_{d} | |
| 167 | AlkLEᵢᵢᵢ | E_{iib}EᵥᵢEₓ | E_{d} | |
| 168 | AlkLEᵢᵥ | E_{iib}EᵥᵢEₓ | E_{d} | |
| 169 | AlkL | E_{iib}EᵥᵢEₓ | Eₑ | |
| 170 | AlkLEᵢ | E_{iib}EᵥᵢEₓ | Eₑ | |
| 171 | AlkLEᵢᵢ | E_{iib}EᵥᵢEₓ | Eₑ | |
| 172 | AlkLEᵢᵢE_{iib} | E_{iib}EᵥᵢEₓ | Eₑ | |
| 173 | AlkLEᵢᵢᵢ | E_{iib}EᵥᵢEₓ | Eₑ | |
| 174 | AlkLEᵢᵥ | E_{iib}EᵥᵢEₓ | Eₑ | |
| 175 | AlkL | E_{iib}EᵥᵢEₓ | E_{f} | |
| 176 | AlkLEᵢ | E_{iib}EᵥᵢEₓ | E_{f} | |
| 177 | AlkLEᵢᵢ | E_{iib}EᵥᵢEₓ | E_{f} | |
| 178 | AlkLEᵢᵢE_{iib} | E_{iib}EᵥᵢEₓ | E_{f} | |
| 179 | AlkLEᵢᵢᵢ | E_{iib}EᵥᵢEₓ | E_{f} | |
| 180 | AlkLEᵢᵥ | E_{iib}EᵥᵢEₓ | E_{f} | |
| 181 | AlkL | Eᵥᵢᵢᵢ | | E₁ |
| 182 | AlkLEᵢ | Eᵥᵢᵢᵢ | | E₁ |
| 183 | AlkLEᵢᵢ | Eᵥᵢᵢᵢ | | E₁ |
| 184 | AlkLEᵢᵢE_{iib} | Eᵥᵢᵢᵢ | | E₁ |
| 185 | AlkLEᵢᵢᵢ | Eᵥᵢᵢᵢ | | E₁ |
| 186 | AlkLEᵢᵥ | Eᵥᵢᵢᵢ | | E₁ |
| 187 | AlkL | Eᵥᵢᵢᵢ | Eₐ | E₁ |
| 188 | AlkLEᵢ | Eᵥᵢᵢᵢ | Eₐ | E₁ |
| 189 | AlkLEᵢᵢ | Eᵥᵢᵢᵢ | Eₐ | E₁ |
| 190 | AlkLEᵢᵢE_{iib} | Eᵥᵢᵢᵢ | Eₐ | E₁ |
| 191 | AlkLEᵢᵢᵢ | Eᵥᵢᵢᵢ | Eₐ | E₁ |
| 192 | AlkLEᵢᵥ | Eᵥᵢᵢᵢ | Eₐ | E₁ |
| 193 | AlkL | Eᵥᵢᵢᵢ | E_{b} | E₁ |
| 194 | AlkLEᵢ | Eᵥᵢᵢᵢ | E_{b} | E₁ |
| 195 | AlkLEᵢᵢ | Eᵥᵢᵢᵢ | E_{b} | E₁ |
| 196 | AlkLEᵢᵢE_{iib} | Eᵥᵢᵢᵢ | E_{b} | E₁ |
| 197 | AlkLEᵢᵢᵢ | Eᵥᵢᵢᵢ | E_{b} | E₁ |
| 198 | AlkLEᵢᵥ | Eᵥᵢᵢᵢ | E_{b} | E₁ |
| 199 | AlkL | Eᵥᵢᵢᵢ | E_{d} | E₁ |
| 200 | AlkLEᵢ | Eᵥᵢᵢᵢ | E_{d} | E₁ |
| 201 | AlkLEᵢᵢ | Eᵥᵢᵢᵢ | E_{d} | E₁ |
| 202 | AlkLEᵢᵢE_{iib} | Eᵥᵢᵢᵢ | E_{d} | E₁ |
| 203 | AlkLEᵢᵢᵢ | Eᵥᵢᵢᵢ | E_{d} | E₁ |
| 204 | AlkLEᵢᵥ | Eᵥᵢᵢᵢ | E_{d} | E₁ |
| 205 | AlkL | Eᵥᵢᵢᵢ | Eₑ | E₁ |
| 206 | AlkLEᵢ | Eᵥᵢᵢᵢ | Eₑ | E₁ |
| 207 | AlkLEᵢᵢ | Eᵥᵢᵢᵢ | Eₑ | E₁ |
| 208 | AlkLEᵢᵢE_{iib} | Eᵥᵢᵢᵢ | Eₑ | E₁ |
| 209 | AlkLEᵢᵢᵢ | Eᵥᵢᵢᵢ | Eₑ | E₁ |
| 210 | AlkLEᵢᵥ | Eᵥᵢᵢᵢ | Eₑ | E₁ |
| 211 | AlkL | Eᵥᵢᵢᵢ | E_{f} | E₁ |
| 212 | AlkLEᵢ | Eᵥᵢᵢᵢ | E_{f} | E₁ |
| 213 | AlkLEᵢᵢ | Eᵥᵢᵢᵢ | E_{f} | E₁ |
| 214 | AlkLEᵢᵢE_{iib} | Eᵥᵢᵢᵢ | E_{f} | E₁ |
| 215 | AlkLEᵢᵢᵢ | Eᵥᵢᵢᵢ | E_{f} | E₁ |
| 216 | AlkLEᵢᵥ | Eᵥᵢᵢᵢ | E_{f} | E₁ |
| 217 | AlkL | Eᵢₓ | | E₁ |
| 218 | AlkLEᵢ | Eᵢₓ | | E₁ |
| 219 | AlkLEᵢᵢ | Eᵢₓ | | E₁ |
| 220 | AlkLEᵢᵢE_{iib} | Eᵢₓ | | E₁ |
| 221 | AlkLEᵢᵢᵢ | Eᵢₓ | | E₁ |
| 222 | AlkLEᵢᵥ | Eᵢₓ | | E₁ |
| 223 | AlkL | Eᵢₓ | Eₐ | E₁ |
| 224 | AlkLEᵢ | Eᵢₓ | Eₐ | E₁ |
| 225 | AlkLEᵢᵢ | Eᵢₓ | Eₐ | E₁ |
| 226 | AlkLEᵢᵢE_{iib} | Eᵢₓ | Eₐ | E₁ |
| 227 | AlkLEᵢᵢᵢ | Eᵢₓ | Eₐ | E₁ |
| 228 | AlkLEᵢᵥ | Eᵢₓ | Eₐ | E₁ |
| 229 | AlkL | Eᵢₓ | E_{b} | E₁ |
| 230 | AlkLEᵢ | Eᵢₓ | E_{b} | E₁ |
| 231 | AlkLEᵢᵢ | Eᵢₓ | E_{b} | E₁ |
| 232 | AlkLEᵢᵢE_{iib} | Eᵢₓ | E_{b} | E₁ |
| 233 | AlkLEᵢᵢᵢ | Eᵢₓ | E_{b} | E₁ |
| 234 | AlkLEᵢᵥ | Eᵢₓ | E_{b} | E₁ |
| 235 | AlkL | Eᵢₓ | E_{d} | E₁ |
| 236 | AlkLEᵢ | Eᵢₓ | E_{d} | E₁ |
| 237 | AlkLEᵢᵢ | Eᵢₓ | E_{d} | E₁ |
| 238 | AlkLEᵢᵢE_{iib} | Eᵢₓ | E_{d} | E₁ |
| 239 | AlkLEᵢᵢᵢ | Eᵢₓ | E_{d} | E₁ |
| 240 | AlkLEᵢᵥ | Eᵢₓ | E_{d} | E₁ |
| 241 | AlkL | Eᵢₓ | Eₑ | E₁ |
| 242 | AlkLEᵢ | Eᵢₓ | Eₑ | E₁ |
| 243 | AlkLEᵢᵢ | Eᵢₓ | Eₑ | E₁ |
| 244 | AlkLEᵢᵢE_{iib} | Eᵢₓ | Eₑ | E₁ |
| 245 | AlkLEᵢᵢᵢ | Eᵢₓ | Eₑ | E₁ |
| 246 | AlkLEᵢᵥ | Eᵢₓ | Eₑ | E₁ |
| 247 | AlkL | Eᵢₓ | E_{f} | E₁ |
| 248 | AlkLEᵢ | Eᵢₓ | E_{f} | E₁ |
| 249 | AlkLEᵢᵢ | Eᵢₓ | E_{f} | E₁ |
| 250 | AlkLEᵢᵢE_{iib} | Eᵢₓ | E_{f} | E₁ |
| 251 | AlkLEᵢᵢᵢ | Eᵢₓ | E_{f} | E₁ |
| 252 | AlkLEᵢᵥ | Eᵢₓ | E_{f} | E₁ |
| 253 | AlkL | Eₓ | | E₁ |
| 254 | AlkLEᵢ | Eₓ | | E₁ |
| 255 | AlkLEᵢᵢ | Eₓ | | E₁ |
| 256 | AlkLEᵢᵢE_{iib} | Eₓ | | E₁ |
| 257 | AlkLEᵢᵢᵢ | Eₓ | | E₁ |
| 258 | AlkLEᵢᵥ | Eₓ | | E₁ |
| 259 | AlkL | Eₓ | Eₐ | E₁ |
| 260 | AlkLEᵢ | Eₓ | Eₐ | E₁ |
| 261 | AlkLEᵢᵢ | Eₓ | Eₐ | E₁ |
| 262 | AlkLEᵢᵢE_{iib} | Eₓ | Eₐ | E₁ |
| 263 | AlkLEᵢᵢᵢ | Eₓ | Eₐ | E₁ |
| 264 | AlkLEᵢᵥ | Eₓ | Eₐ | E₁ |
| 265 | AlkL | Eₓ | E_{b} | E₁ |
| 266 | AlkLEᵢ | Eₓ | E_{b} | E₁ |
| 267 | AlkLEᵢᵢ | Eₓ | E_{b} | E₁ |
| 268 | AlkLEᵢᵢE_{iib} | Eₓ | E_{b} | E₁ |
| 269 | AlkLEᵢᵢᵢ | Eₓ | E_{b} | E₁ |
| 270 | AlkLEᵢᵥ | Eₓ | E_{b} | E₁ |
| 271 | AlkL | Eₓ | E_{d} | E₁ |
| 272 | AlkLEᵢ | Eₓ | E_{d} | E₁ |
| 273 | AlkLEᵢᵢ | Eₓ | E_{d} | E₁ |
| 274 | AlkLEᵢᵢE_{iib} | Eₓ | E_{d} | E₁ |
| 275 | AlkLEᵢᵢᵢ | Eₓ | E_{d} | E₁ |
| 276 | AlkLEᵢᵥ | Eₓ | E_{d} | E₁ |
| 277 | AlkL | Eₓ | Eₑ | E₁ |
| 278 | AlkLEᵢ | Eₓ | Eₑ | E₁ |
| 279 | AlkLEᵢᵢ | Eₓ | Eₑ | E₁ |
| 280 | AlkLEᵢᵢE_{iib} | Eₓ | Eₑ | E₁ |
| 281 | AlkLEᵢᵢᵢ | Eₓ | Eₑ | E₁ |
| 282 | AlkLEᵢᵥ | Eₓ | Eₑ | E₁ |
| 283 | AlkL | Eₓ | E_{f} | E₁ |
| 284 | AlkLEᵢ | Eₓ | E_{f} | E₁ |
| 285 | AlkLEᵢᵢ | Eₓ | E_{f} | E₁ |
| 286 | AlkLEᵢᵢE_{iib} | Eₓ | E_{f} | E₁ |
| 287 | AlkLEᵢᵢᵢ | Eₓ | E_{f} | E₁ |
| 288 | AlkLEᵢᵥ | Eₓ | E_{f} | E₁ |
| 289 | AlkL | EᵥᵢEᵥᵢᵢᵢ | | E₁ |
| 290 | AlkLEᵢ | EᵥᵢEᵥᵢᵢᵢ | | E₁ |
| 291 | AlkLEᵢᵢ | EᵥᵢEᵥᵢᵢᵢ | | E₁ |
| 292 | AlkLEᵢᵢE_{iib} | EᵥᵢEᵥᵢᵢᵢ | | E₁ |
| 293 | AlkLEᵢᵢᵢ | EᵥᵢEᵥᵢᵢᵢ | | E₁ |
| 294 | AlkLEᵢᵥ | EᵥᵢEᵥᵢᵢᵢ | | E₁ |
| 295 | AlkL | EᵥᵢEᵥᵢᵢᵢ | Eₐ | E₁ |
| 296 | AlkLEᵢ | EᵥᵢEᵥᵢᵢᵢ | Eₐ | E₁ |
| 297 | AlkLEᵢᵢ | EᵥᵢEᵥᵢᵢᵢ | Eₐ | E₁ |
| 298 | AlkLEᵢᵢE_{iib} | EᵥᵢEᵥᵢᵢᵢ | Eₐ | E₁ |
| 299 | AlkLEᵢᵢᵢ | EᵥᵢEᵥᵢᵢᵢ | Eₐ | E₁ |
| 300 | AlkLEᵢᵥ | EᵥᵢEᵥᵢᵢᵢ | Eₐ | E₁ |
| 301 | AlkL | EᵥᵢEᵥᵢᵢᵢ | E_{b} | E₁ |
| 302 | AlkLEᵢ | EᵥᵢEᵥᵢᵢᵢ | E_{b} | E₁ |
| 303 | AlkLEᵢᵢ | EᵥᵢEᵥᵢᵢᵢ | E_{b} | E₁ |
| 304 | AlkLEᵢᵢE_{iib} | EᵥᵢEᵥᵢᵢᵢ | E_{b} | E₁ |
| 305 | AlkLEᵢᵢᵢ | EᵥᵢEᵥᵢᵢᵢ | E_{b} | E₁ |
| 306 | AlkLEᵢᵥ | EᵥᵢEᵥᵢᵢᵢ | E_{b} | E₁ |
| 307 | AlkL | EᵥᵢEᵥᵢᵢᵢ | E_{d} | E₁ |
| 308 | AlkLEᵢ | EᵥᵢEᵥᵢᵢᵢ | E_{d} | E₁ |
| 309 | AlkLEᵢᵢ | EᵥᵢEᵥᵢᵢᵢ | E_{d} | E₁ |
| 310 | AlkLEᵢᵢE_{iib} | EᵥᵢEᵥᵢᵢᵢ | E_{d} | E₁ |
| 311 | AlkLEᵢᵢᵢ | EᵥᵢEᵥᵢᵢᵢ | E_{d} | E₁ |
| 312 | AlkLEᵢᵥ | EᵥᵢEᵥᵢᵢᵢ | E_{d} | E₁ |
| 313 | AlkL | EᵥᵢEᵥᵢᵢᵢ | Eₑ | E₁ |
| 314 | AlkLEᵢ | EᵥᵢEᵥᵢᵢᵢ | Eₑ | E₁ |
| 315 | AlkLEᵢᵢ | EᵥᵢEᵥᵢᵢᵢ | Eₑ | E₁ |
| 316 | AlkLEᵢᵢE_{iib} | EᵥᵢEᵥᵢᵢᵢ | Eₑ | E₁ |
| 317 | AlkLEᵢᵢᵢ | EᵥᵢEᵥᵢᵢᵢ | Eₑ | E₁ |
| 318 | AlkLEᵢᵥ | EᵥᵢEᵥᵢᵢᵢ | Eₑ | E₁ |
| 319 | AlkL | EᵥᵢEᵥᵢᵢᵢ | E_{f} | E₁ |
| 320 | AlkLEᵢ | EᵥᵢEᵥᵢᵢᵢ | E_{f} | E₁ |
| 321 | AlkLEᵢᵢ | EᵥᵢEᵥᵢᵢᵢ | E_{f} | E₁ |
| 322 | AlkLEᵢᵢE_{iib} | EᵥᵢEᵥᵢᵢᵢ | E_{f} | E₁ |
| 323 | AlkLEᵢᵢᵢ | EᵥᵢEᵥᵢᵢᵢ | E_{f} | E₁ |
| 324 | AlkLEᵢᵥ | EᵥᵢEᵥᵢᵢᵢ | E_{f} | E₁ |
| 325 | AlkL | E_{iib}EᵥᵢEₓ | | E₁ |
| 326 | AlkLEᵢ | E_{iib}EᵥᵢEₓ | | E₁ |
| 327 | AlkLEᵢᵢ | E_{iib}EᵥᵢEₓ | | E₁ |
| 328 | AlkLEᵢᵢE_{iib} | E_{iib}EᵥᵢEₓ | | E₁ |
| 329 | AlkLEᵢᵢᵢ | E_{iib}EᵥᵢEₓ | | E₁ |
| 330 | AlkLEᵢᵥ | E_{iib}EᵥᵢEₓ | | E₁ |
| 331 | AlkL | E_{iib}EᵥᵢEₓ | Eₐ | E₁ |
| 332 | AlkLEᵢ | E_{iib}EᵥᵢEₓ | Eₐ | E₁ |
| 333 | AlkLEᵢᵢ | E_{iib}EᵥᵢEₓ | Eₐ | E₁ |
| 334 | AlkLEᵢᵢE_{iib} | E_{iib}EᵥᵢEₓ | Eₐ | E₁ |
| 335 | AlkLEᵢᵢᵢ | E_{iib}EᵥᵢEₓ | Eₐ | E₁ |
| 336 | AlkLEᵢᵥ | E_{iib}EᵥᵢEₓ | Eₐ | E₁ |
| 337 | AlkL | E_{iib}EᵥᵢEₓ | E_{b} | E₁ |
| 338 | AlkLEᵢ | E_{iib}EᵥᵢEₓ | E_{b} | E₁ |
| 339 | AlkLEᵢᵢ | E_{iib}EᵥᵢEₓ | E_{b} | E₁ |
| 340 | AlkLEᵢᵢE_{iib} | E_{iib}EᵥᵢEₓ | E_{b} | E₁ |
| 341 | AlkLEᵢᵢᵢ | E_{iib}EᵥᵢEₓ | E_{b} | E₁ |
| 342 | AlkLEᵢᵥ | E_{iib}EᵥᵢEₓ | E_{b} | E₁ |
| 343 | AlkL | E_{iib}EᵥᵢEₓ | E_{d} | E₁ |
| 344 | AlkLEᵢ | E_{iib}EᵥᵢEₓ | E_{d} | E₁ |
| 345 | AlkLEᵢᵢ | E_{iib}EᵥᵢEₓ | E_{d} | E₁ |
| 346 | AlkLEᵢᵢE_{iib} | E_{iib}EᵥᵢEₓ | E_{d} | E₁ |
| 347 | AlkLEᵢᵢᵢ | E_{iib}EᵥᵢEₓ | E_{d} | E₁ |
| 348 | AlkLEᵢᵥ | E_{iib}EᵥᵢEₓ | E_{d} | E₁ |
| 349 | AlkL | E_{iib}EᵥᵢEₓ | Eₑ | E₁ |
| 350 | AlkLEᵢ | E_{iib}EᵥᵢEₓ | Eₑ | E₁ |
| 351 | AlkLEᵢᵢ | E_{iib}EᵥᵢEₓ | Eₑ | E₁ |
| 352 | AlkLEᵢᵢE_{iib} | E_{iib}EᵥᵢEₓ | Eₑ | E₁ |
| 353 | AlkLEᵢᵢᵢ | E_{iib}EᵥᵢEₓ | Eₑ | E₁ |
| 354 | AlkLEᵢᵥ | E_{iib}EᵥᵢEₓ | Eₑ | E₁ |
| 355 | AlkL | E_{iib}EᵥᵢEₓ | E_{f} | E₁ |
| 356 | AlkLEᵢ | E_{iib}EᵥᵢEₓ | E_{f} | E₁ |
| 357 | AlkLEᵢᵢ | E_{iib}EᵥᵢEₓ | E_{f} | E₁ |
| 358 | AlkLEᵢᵢE_{iib} | E_{iib}EᵥᵢEₓ | E_{f} | E₁ |
| 359 | AlkLEᵢᵢᵢ | E_{iib}EᵥᵢEₓ | E_{f} | E₁ |
| 360 | AlkLEᵢᵥ | E_{iib}EᵥᵢEₓ | E_{f} | E₁ |

[0194] Microorganisms (abbreviated to MO) which are very especially preferred according to the invention are outstandingly suitable for the production of alkanes and have increased or reduced enzymatic activities (abbreviated to E) which are described in the table hereinbelow, it being possible for these enzymatic activities additionally to be advantageously combined with an enzymatic activity described for the enzyme 3-ketoacyl-ACP (acyl carrier protein) synthase III (EC 2.3.1.41), which enzymatic activity is increased in comparison with the wild type of the microorganism, in particular the enzymatic activity of plants, preferably the enzymatic activity of plants whose seeds contain fatty acids with alkyl residues shorter than 14 C atoms and especially preferably the enzymatic activity of plants of the genera Cuphea, Elaeis, Cocos, Umbellularia and Cinnamomum and gene products selected from among AccA, AccB, AccC, AccD, AceE, AceF, Lpd, AcpP, FabA, FabB, FabD, FabF, FabG, FabH, FabI, FabZ, PanD, PanK, UdhA, PntA or PntB.

[0195] Any desired combinations of at least two of these enzymatic activities may advantageously be increased.

[0196] It may be additionally advantageous that the microorganism is equipped with an enzymatic activity which is described for the gene products selected from among TdcE, PflA, PflB, PflC, PfID, PoxB, YgfG, AckA, AckB, TdcD, Pta, LdhA, AdhE, MgsA, FdnG, FdnH, FdnI, FdhF, FdoG, FdoH, FdoI, PrpC, PrpD, PrpF, PrpB, TdcD, Pdc, PorA, PorB, PorC, PorD, AlsS, IlvB, IlvM, IlvN, IlvG, IlvI, IlvH, AlsD, ButB, Thl, ThlA, ThlB, PhaA, PhaB, Crt, BdhA, BdhB, Adc, Adh, CtfB, AtoA, AtoD, LdhL, GltA, FabR, FhuA, Dld, LldA or LldP, individually or in any desired combination, and which is reduced in comparison with the wild type of the microorganism.

| | | |
|---|---|---|
| MO | Increased E | Reduced E |

| | | | | |
|---|---|---|---|---|
| 1 | AlkLEₓᵢᵢ | Eᵥᵢᵢᵢ | | |
| 2 | AlkLEₓᵢᵢEᵢ | Eᵥᵢᵢᵢ | | |
| 3 | AlkLEₓᵢᵢEᵢᵢ | Eᵥᵢᵢᵢ | | |
| 4 | AlkLEₓᵢᵢEᵢᵢE_{iib} | Eᵥᵢᵢᵢ | | |
| 5 | AlkLEₓᵢᵢEᵢᵢᵢ | Eᵥᵢᵢᵢ | | |
| 6 | AlkLEₓᵢᵢEᵢᵥ | Eᵥᵢᵢᵢ | | |
| 7 | AlkLEₓᵢᵢ | Eᵥᵢᵢᵢ | Eₐ | |
| 8 | AlkLEₓᵢᵢEᵢ | Eᵥᵢᵢᵢ | Eₐ | |
| 9 | AlkLEₓᵢᵢEᵢᵢ | Eᵥᵢᵢᵢ | Eₐ | |
| 10 | AlkLEₓᵢᵢEᵢᵢE_{iib} | Eᵥᵢᵢᵢ | Eₐ | |
| 11 | AlkLEₓᵢᵢEᵢᵢᵢ | Eᵥᵢᵢᵢ | Eₐ | |
| 12 | AlkLEₓᵢᵢEᵢᵥ | Eᵥᵢᵢᵢ | Eₐ | |
| 13 | AlkLEₓᵢᵢ | Eᵥᵢᵢᵢ | E_{b} | |
| 14 | AlkLEₓᵢᵢEᵢ | Eᵥᵢᵢᵢ | E_{b} | |
| 15 | AlkLEₓᵢᵢEᵢᵢ | Eᵥᵢᵢᵢ | E_{b} | |
| 16 | AlkLEₓᵢᵢEᵢᵢE_{iib} | Eᵥᵢᵢᵢ | E_{b} | |
| 17 | AlkLEₓᵢᵢEᵢᵢᵢ | Eᵥᵢᵢᵢ | E_{b} | |
| 18 | AlkLEₓᵢᵢEᵢᵥ | Eᵥᵢᵢᵢ | E_{b} | |
| 19 | AlkLEₓᵢᵢ | Eᵥᵢᵢᵢ | E_{d} | |
| 20 | AlkLEₓᵢᵢEᵢ | Eᵥᵢᵢᵢ | E_{d} | |
| 21 | AlkLEₓᵢᵢEᵢᵢ | Eᵥᵢᵢᵢ | E_{d} | |
| 22 | AlkLEₓᵢᵢEᵢᵢE_{iib} | Eᵥᵢᵢᵢ | E_{d} | |
| 23 | AlkLEₓᵢᵢEᵢᵢᵢ | Eᵥᵢᵢᵢ | E_{d} | |
| 24 | AlkLEₓᵢᵢEᵢᵥ | Eᵥᵢᵢᵢ | E_{d} | |
| 25 | AlkLEₓᵢᵢ | Eᵥᵢᵢᵢ | Eₑ | |
| 26 | AlkLEₓᵢᵢEᵢ | Eᵥᵢᵢᵢ | Eₑ | |
| 27 | AlkLEₓᵢᵢEᵢᵢ | Eᵥᵢᵢᵢ | Eₑ | |
| 28 | AlkLEₓᵢᵢEᵢᵢE_{iib} | Eᵥᵢᵢᵢ | Eₑ | |
| 29 | AlkLEₓᵢᵢEᵢᵢᵢ | Eᵥᵢᵢᵢ | Eₑ | |
| 30 | AlkLEₓᵢᵢEᵢᵥ | Eᵥᵢᵢᵢ | Eₑ | |
| 31 | AlkLEₓᵢᵢ | Eᵥᵢᵢᵢ | E_{f} | |
| 32 | AlkLEₓᵢᵢEᵢ | Eᵥᵢᵢᵢ | E_{f} | |
| 33 | AlkLEₓᵢᵢEᵢᵢ | Eᵥᵢᵢᵢ | E_{f} | |
| 34 | AlkLEₓᵢᵢEᵢᵢE_{iib} | Eᵥᵢᵢᵢ | E_{f} | |
| 35 | AlkLEₓᵢᵢEᵢᵢᵢ | Eᵥᵢᵢᵢ | E_{f} | |
| 36 | AlkLEₓᵢᵢEᵢᵥ | Eᵥᵢᵢᵢ | E_{f} | |
| 37 | AlkLEₓᵢᵢ | Eᵢₓ | | |
| 38 | AlkLEₓᵢᵢEᵢ | Eᵢₓ | | |
| 39 | AlkLEₓᵢᵢEᵢᵢ | Eᵢₓ | | |
| 40 | AlkLEₓᵢᵢEᵢᵢE_{iib} | Eᵢₓ | | |
| 41 | AlkLEₓᵢᵢEᵢᵢᵢ | Eᵢₓ | | |
| 42 | AlkLEₓᵢᵢEᵢᵥ | Eᵢₓ | | |
| 43 | AlkLEₓᵢᵢ | Eᵢₓ | Eₐ | |
| 44 | AlkLEₓᵢᵢEᵢ | Eᵢₓ | Eₐ | |
| 45 | AlkLEₓᵢᵢEᵢᵢ | Eᵢₓ | Eₐ | |
| 46 | AlkLEₓᵢᵢEᵢᵢE_{iib} | Eᵢₓ | Eₐ | |
| 47 | AlkLEₓᵢᵢEᵢᵢᵢ | Eᵢₓ | Eₐ | |
| 48 | AlkLEₓᵢᵢEᵢᵥ | Eᵢₓ | Eₐ | |
| 49 | AlkLEₓᵢᵢ | Eᵢₓ | E_{b} | |
| 50 | AlkLEₓᵢᵢEᵢ | Eᵢₓ | E_{b} | |
| 51 | AlkLEₓᵢᵢEᵢᵢ | Eᵢₓ | E_{b} | |
| 52 | AlkLEₓᵢᵢEᵢᵢE_{iib} | Eᵢₓ | E_{b} | |
| 53 | AlkLEₓᵢᵢEᵢᵢᵢ | Eᵢₓ | E_{b} | |
| 54 | AlkLEₓᵢᵢEᵢᵥ | Eᵢₓ | E_{b} | |
| 55 | AlkLEₓᵢᵢ | Eᵢₓ | E_{d} | |
| 56 | AlkLEₓᵢᵢEᵢ | Eᵢₓ | E_{d} | |
| 57 | AlkLEₓᵢᵢEᵢᵢ | Eᵢₓ | E_{d} | |
| 58 | AlkLEₓᵢᵢEᵢᵢE_{iib} | Eᵢₓ | E_{d} | |
| 59 | AlkLEₓᵢᵢEᵢᵢᵢ | Eᵢₓ | E_{d} | |
| 60 | AlkLEₓᵢᵢEᵢᵥ | Eᵢₓ | E_{d} | |
| 61 | AlkLEₓᵢᵢ | Eᵢₓ | Eₑ | |
| 62 | AlkLEₓᵢᵢEᵢ | Eᵢₓ | Eₑ | |
| 63 | AlkLEₓᵢᵢEᵢᵢ | Eᵢₓ | Eₑ | |
| 64 | AlkLEₓᵢᵢEᵢᵢE_{iib} | Eᵢₓ | Eₑ | |
| 65 | AlkLEₓᵢᵢEᵢᵢᵢ | Eᵢₓ | Eₑ | |
| 66 | AlkLEₓᵢᵢEᵢᵥ | Eᵢₓ | Eₑ | |
| 67 | AlkLEₓᵢᵢ | Eᵢₓ | E_{f} | |
| 68 | AlkLEₓᵢᵢEᵢ | Eᵢₓ | E_{f} | |
| 69 | AlkLEₓᵢᵢEᵢᵢ | Eᵢₓ | E_{f} | |
| 70 | AlkLEₓᵢᵢEᵢᵢE_{iib} | Eᵢₓ | E_{f} | |
| 71 | AlkLEₓᵢᵢEᵢᵢᵢ | Eᵢₓ | E_{f} | |
| 72 | AlkLEₓᵢᵢEᵢᵥ | Eᵢₓ | E_{f} | |
| 73 | AlkLEₓᵢᵢ | Eₓ | | |
| 74 | AlkLEₓᵢᵢEᵢ | Eₓ | | |
| 75 | AlkLEₓᵢᵢEᵢᵢ | Eₓ | | |
| 76 | AlkLEₓᵢᵢEᵢᵢE_{iib} | Eₓ | | |
| 77 | AlkLEₓᵢᵢEᵢᵢᵢ | Eₓ | | |
| 78 | AlkLEₓᵢᵢEᵢᵥ | Eₓ | | |
| 79 | AlkLEₓᵢᵢ | Eₓ | Eₐ | |
| 80 | AlkLEₓᵢᵢEᵢ | Eₓ | Eₐ | |
| 81 | AlkLEₓᵢᵢEᵢᵢ | Eₓ | Eₐ | |
| 82 | AlkLEₓᵢᵢEᵢᵢE_{iib} | Eₓ | Eₐ | |
| 83 | AlkLEₓᵢᵢEᵢᵢᵢ | Eₓ | Eₐ | |
| 84 | AlkLEₓᵢᵢEᵢᵥ | Eₓ | Eₐ | |
| 85 | AlkLEₓᵢᵢ | Eₓ | E_{b} | |
| 86 | AlkLEₓᵢᵢEᵢ | Eₓ | E_{b} | |
| 87 | AlkLEₓᵢᵢEᵢᵢ | Eₓ | E_{b} | |
| 88 | AlkLEₓᵢᵢEᵢᵢE_{iib} | Eₓ | E_{b} | |
| 89 | AlkLEₓᵢᵢEᵢᵢᵢ | Eₓ | E_{b} | |
| 90 | AlkLEₓᵢᵢEᵢᵥ | Eₓ | E_{b} | |
| 91 | AlkLEₓᵢᵢ | Eₓ | E_{d} | |
| 92 | AlkLEₓᵢᵢEᵢ | Eₓ | E_{d} | |
| 93 | AlkLEₓᵢᵢEᵢᵢ | Eₓ | E_{d} | |
| 94 | AlkLEₓᵢᵢEᵢᵢE_{iib} | Eₓ | E_{d} | |
| 95 | AlkLEₓᵢᵢEᵢᵢᵢ | Eₓ | E_{d} | |
| 96 | AlkLEₓᵢᵢEᵢᵥ | Eₓ | E_{d} | |
| 97 | AlkLEₓᵢᵢ | Eₓ | Eₑ | |
| 98 | AlkLEₓᵢᵢEᵢ | Eₓ | Eₑ | |
| 99 | AlkLEₓᵢᵢEᵢᵢ | Eₓ | Eₑ | |
| 100 | AlkLEₓᵢᵢEᵢᵢE_{iib} | Eₓ | Eₑ | |
| 101 | AlkLEₓᵢᵢEᵢᵢᵢ | Eₓ | Eₑ | |
| 102 | AlkLEₓᵢᵢEᵢᵥ | Eₓ | Eₑ | |
| 103 | AlkLEₓᵢᵢ | Eₓ | E_{f} | |
| 104 | AlkLEₓᵢᵢEᵢ | Eₓ | E_{f} | |
| 105 | AlkLEₓᵢᵢEᵢᵢ | Eₓ | E_{f} | |
| 106 | AlkLEₓᵢᵢEᵢᵢE_{iib} | Eₓ | E_{f} | |
| 107 | AlkLEₓᵢᵢEᵢᵢᵢ | Eₓ | E_{f} | |
| 108 | AlkLEₓᵢᵢEᵢᵥ | Eₓ | E_{f} | |
| 109 | AlkLEₓᵢᵢ | EᵥᵢEᵥᵢᵢᵢ | | |
| 110 | AlkLEₓᵢᵢEᵢ | EᵥᵢEᵥᵢᵢᵢ | | |
| 111 | AlkLEₓᵢᵢEᵢᵢ | EᵥᵢEᵥᵢᵢᵢ | | |
| 112 | AlkLEₓᵢᵢEᵢᵢE_{iib} | EᵥᵢEᵥᵢᵢᵢ | | |
| 113 | AlkLEₓᵢᵢEᵢᵢᵢ | EᵥᵢEᵥᵢᵢᵢ | | |
| 114 | AlkLEₓᵢᵢEᵢᵥ | EᵥᵢEᵥᵢᵢᵢ | | |
| 115 | AlkLEₓᵢᵢ | EᵥᵢEᵥᵢᵢᵢ | Eₐ | |
| 116 | AlkLEₓᵢᵢEᵢ | EᵥᵢEᵥᵢᵢᵢ | Eₐ | |
| 117 | AlkLEₓᵢᵢEᵢᵢ | EᵥᵢEᵥᵢᵢᵢ | Eₐ | |
| 118 | AlkLEₓᵢᵢEᵢᵢE_{iib} | EᵥᵢEᵥᵢᵢᵢ | Eₐ | |
| 119 | AlkLEₓᵢᵢEᵢᵢᵢ | EᵥᵢEᵥᵢᵢᵢ | Eₐ | |
| 120 | AlkLEₓᵢᵢEᵢᵥ | EᵥᵢEᵥᵢᵢᵢ | Eₐ | |
| 121 | AlkLEₓᵢᵢ | EᵥᵢEᵥᵢᵢᵢ | E_{b} | |
| 122 | AlkLEₓᵢᵢEᵢ | EᵥᵢEᵥᵢᵢᵢ | E_{b} | |
| 123 | AlkLEₓᵢᵢEᵢᵢ | EᵥᵢEᵥᵢᵢᵢ | E_{b} | |
| 124 | AlkLEₓᵢᵢEᵢᵢE_{iib} | EᵥᵢEᵥᵢᵢᵢ | E_{b} | |
| 125 | AlkLEₓᵢᵢEᵢᵢᵢ | EᵥᵢEᵥᵢᵢᵢ | E_{b} | |
| 126 | AlkLEₓᵢᵢEᵢᵥ | EᵥᵢEᵥᵢᵢᵢ | E_{b} | |
| 127 | AlkLEₓᵢᵢ | EᵥᵢEᵥᵢᵢᵢ | E_{d} | |
| 128 | AlkLEₓᵢᵢEᵢ | EᵥᵢEᵥᵢᵢᵢ | E_{d} | |
| 129 | AlkLEₓᵢᵢEᵢᵢ | EᵥᵢEᵥᵢᵢᵢ | E_{d} | |
| 130 | AlkLEₓᵢᵢEᵢᵢE_{iib} | EᵥᵢEᵥᵢᵢᵢ | E_{d} | |
| 131 | AlkLEₓᵢᵢEᵢᵢᵢ | EᵥᵢEᵥᵢᵢᵢ | E_{d} | |
| 132 | AlkLEₓᵢᵢEᵢᵥ | EᵥᵢEᵥᵢᵢᵢ | E_{d} | |
| 133 | AlkLEₓᵢᵢ | EᵥᵢEᵥᵢᵢᵢ | Eₑ | |
| 134 | AlkLEₓᵢᵢEᵢ | EᵥᵢEᵥᵢᵢᵢ | Eₑ | |
| 135 | AlkLEₓᵢᵢEᵢᵢ | EᵥᵢEᵥᵢᵢᵢ | Eₑ | |
| 136 | AlkLEₓᵢᵢEᵢᵢE_{iib} | EᵥᵢEᵥᵢᵢᵢ | Eₑ | |
| 137 | AlkLEₓᵢᵢEᵢᵢᵢ | EᵥᵢEᵥᵢᵢᵢ | Eₑ | |
| 138 | AlkLEₓᵢᵢEᵢᵥ | EᵥᵢEᵥᵢᵢᵢ | Eₑ | |
| 139 | AlkLEₓᵢᵢ | EᵥᵢEᵥᵢᵢᵢ | E_{f} | |
| 140 | AlkLEₓᵢᵢEᵢ | EᵥᵢEᵥᵢᵢᵢ | E_{f} | |
| 141 | AlkLEₓᵢᵢEᵢᵢ | EᵥᵢEᵥᵢᵢᵢ | E_{f} | |
| 142 | AlkLEₓᵢᵢEᵢᵢE_{iib} | EᵥᵢEᵥᵢᵢᵢ | E_{f} | |
| 143 | AlkLEₓᵢᵢEᵢᵢᵢ | EᵥᵢEᵥᵢᵢᵢ | E_{f} | |
| 144 | AlkLEₓᵢᵢEᵢᵥ | EᵥᵢEᵥᵢᵢᵢ | E_{f} | |
| 145 | AlkLEₓᵢᵢ | E_{iib}EᵥᵢEₓ | | |
| 146 | AlkLEₓᵢᵢEᵢ | E_{iib}EᵥᵢEₓ | | |
| 147 | AlkLEₓᵢᵢEᵢᵢ | E_{iib}EᵥᵢEₓ | | |
| 148 | AlkLEₓᵢᵢEᵢᵢE_{iib} | E_{iib}EᵥᵢEₓ | | |
| 149 | AlkLEₓᵢᵢEᵢᵢᵢ | E_{iib}EᵥᵢEₓ | | |
| 150 | AlkLEₓᵢᵢEᵢᵥ | E_{iib}EᵥᵢEₓ | | |
| 151 | AlkLEₓᵢᵢ | E_{iib}EᵥᵢEₓ | Eₐ | |
| 152 | AlkLEₓᵢᵢEᵢ | E_{iib}EᵥᵢEₓ | Eₐ | |
| 153 | AlkLEₓᵢᵢEᵢᵢ | E_{iib}EᵥᵢEₓ | Eₐ | |
| 154 | AlkLEₓᵢᵢEᵢᵢE_{iib} | E_{iib}EᵥᵢEₓ | Eₐ | |
| 155 | AlkLEₓᵢᵢEᵢᵢᵢ | E_{iib}EᵥᵢEₓ | Eₐ | |
| 156 | AlkLEₓᵢᵢEᵢᵥ | E_{iib}EᵥᵢEₓ | Eₐ | |
| 157 | AlkLEₓᵢᵢ | E_{iib}EᵥᵢEₓ | E_{b} | |
| 158 | AlkLEₓᵢᵢEᵢ | E_{iib}EᵥᵢEₓ | E_{b} | |
| 159 | AlkLEₓᵢᵢEᵢᵢ | E_{iib}EᵥᵢEₓ | E_{b} | |
| 160 | AlkLEₓᵢᵢEᵢᵢE_{iib} | E_{iib}EᵥᵢEₓ | E_{b} | |
| 161 | AlkLEₓᵢᵢEᵢᵢᵢ | E_{iib}EᵥᵢEₓ | E_{b} | |
| 162 | AlkLEₓᵢᵢEᵢᵥ | E_{iib}EᵥᵢEₓ | E_{b} | |
| 163 | AlkLEₓᵢᵢ | E_{iib}EᵥᵢEₓ | E_{d} | |
| 164 | AlkLEₓᵢᵢEᵢ | E_{iib}EᵥᵢEₓ | E_{d} | |
| 165 | AlkLEₓᵢᵢEᵢᵢ | E_{iib}EᵥᵢEₓ | E_{d} | |
| 166 | AlkLEₓᵢᵢEᵢᵢE_{iib} | E_{iib}EᵥᵢEₓ | E_{d} | |
| 167 | AlkLEₓᵢᵢEᵢᵢᵢ | E_{iib}EᵥᵢEₓ | E_{d} | |
| 168 | AlkLEₓᵢᵢEᵢᵥ | E_{iib}EᵥᵢEₓ | E_{d} | |
| 169 | AlkLEₓᵢᵢ | E_{iib}EᵥᵢEₓ | Eₑ | |
| 170 | AlkLEₓᵢᵢEᵢ | E_{iib}EᵥᵢEₓ | Eₑ | |
| 171 | AlkLEₓᵢᵢEᵢᵢ | E_{iib}EᵥᵢEₓ | Eₑ | |
| 172 | AlkLEₓᵢᵢEᵢᵢE_{iib} | E_{iib}EᵥᵢEₓ | Eₑ | |
| 173 | AlkLEₓᵢᵢEᵢᵢᵢ | E_{iib}EᵥᵢEₓ | Eₑ | |
| 174 | AlkLEₓᵢᵢEᵢᵥ | E_{iib}EᵥᵢEₓ | Eₑ | |
| 175 | AlkLEₓᵢᵢ | E_{iib}EᵥᵢEₓ | E_{f} | |
| 176 | AlkLEₓᵢᵢEᵢ | E_{iib}EᵥᵢEₓ | E_{f} | |
| 177 | AlkLEₓᵢᵢEᵢᵢ | E_{iib}EᵥᵢEₓ | E_{f} | |
| 178 | AlkLEₓᵢᵢEᵢᵢE_{iib} | E_{iib}EᵥᵢEₓ | E_{f} | |
| 179 | AlkLEₓᵢᵢEᵢᵢᵢ | E_{iib}EᵥᵢEₓ | E_{f} | |
| 180 | AlkLEₓᵢᵢEᵢᵥ | E_{iib}EᵥᵢEₓ | E_{f} | |
| 181 | AlkLEₓᵢᵢ | Eᵥᵢᵢᵢ | | E₁ |
| 182 | AlkLEₓᵢᵢEᵢ | Eᵥᵢᵢᵢ | | E₁ |
| 183 | AlkLEₓᵢᵢEᵢᵢ | Eᵥᵢᵢᵢ | | E₁ |
| 184 | AlkLEₓᵢᵢEᵢᵢE_{iib} | Eᵥᵢᵢᵢ | | E₁ |
| 185 | AlkLEₓᵢᵢEᵢᵢᵢ | Eᵥᵢᵢᵢ | | E₁ |
| 186 | AlkLEₓᵢᵢEᵢᵥ | Eᵥᵢᵢᵢ | | E₁ |
| 187 | AlkLEₓᵢᵢ | Eᵥᵢᵢᵢ | Eₐ | E₁ |
| 188 | AlkLEₓᵢᵢEᵢ | Eᵥᵢᵢᵢ | Eₐ | E₁ |
| 189 | AlkLEₓᵢᵢEᵢᵢ | Eᵥᵢᵢᵢ | Eₐ | E₁ |
| 190 | AlkLEₓᵢᵢEᵢᵢE_{iib} | Eᵥᵢᵢᵢ | Eₐ | E₁ |
| 191 | AlkLEₓᵢᵢEᵢᵢᵢ | Eᵥᵢᵢᵢ | Eₐ | E₁ |
| 192 | AlkLEₓᵢᵢEᵢᵥ | Eᵥᵢᵢᵢ | Eₐ | E₁ |
| 193 | AlkLEₓᵢᵢ | Eᵥᵢᵢᵢ | E_{b} | E₁ |
| 194 | AlkLEₓᵢᵢEᵢ | Eᵥᵢᵢᵢ | E_{b} | E₁ |
| 195 | AlkLEₓᵢᵢEᵢᵢ | Eᵥᵢᵢᵢ | E_{b} | E₁ |
| 196 | AlkLEₓᵢᵢEᵢᵢE_{iib} | Eᵥᵢᵢᵢ | E_{b} | E₁ |
| 197 | AlkLEₓᵢᵢEᵢᵢᵢ | Eᵥᵢᵢᵢ | E_{b} | E₁ |
| 198 | AlkLEₓᵢᵢEᵢᵥ | Eᵥᵢᵢᵢ | E_{b} | E₁ |
| 199 | AlkLEₓᵢᵢ | Eᵥᵢᵢᵢ | E_{d} | E₁ |
| 200 | AlkLEₓᵢᵢEᵢ | Eᵥᵢᵢᵢ | E_{d} | E₁ |
| 201 | AlkLEₓᵢᵢEᵢᵢ | Eᵥᵢᵢᵢ | E_{d} | E₁ |
| 202 | AlkLEₓᵢᵢEᵢᵢE_{iib} | Eᵥᵢᵢᵢ | E_{d} | E₁ |
| 203 | AlkLEₓᵢᵢEᵢᵢᵢ | Eᵥᵢᵢᵢ | E_{d} | E₁ |
| 204 | AlkLEₓᵢᵢEᵢᵥ | Eᵥᵢᵢᵢ | E_{d} | E₁ |
| 205 | AlkLEₓᵢᵢ | Eᵥᵢᵢᵢ | Eₑ | E₁ |
| 206 | AlkLEₓᵢᵢEᵢ | Eᵥᵢᵢᵢ | Eₑ | E₁ |
| 207 | AlkLEₓᵢᵢEᵢᵢ | Eᵥᵢᵢᵢ | Eₑ | E₁ |
| 208 | AlkLEₓᵢᵢEᵢᵢE_{iib} | Eᵥᵢᵢᵢ | Eₑ | E₁ |
| 209 | AlkLEₓᵢᵢEᵢᵢᵢ | Eᵥᵢᵢᵢ | Eₑ | E₁ |
| 210 | AlkLEₓᵢᵢEᵢᵥ | Eᵥᵢᵢᵢ | Eₑ | E₁ |
| 211 | AlkLEₓᵢᵢ | Eᵥᵢᵢᵢ | E_{f} | E₁ |
| 212 | AlkLEₓᵢᵢEᵢ | Eᵥᵢᵢᵢ | E_{f} | E₁ |
| 213 | AlkLEₓᵢᵢEᵢᵢ | Eᵥᵢᵢᵢ | E_{f} | E₁ |
| 214 | AlkLEₓᵢᵢEᵢᵢE_{iib} | Eᵥᵢᵢᵢ | E_{f} | E₁ |
| 215 | AlkLEₓᵢᵢEᵢᵢᵢ | Eᵥᵢᵢᵢ | E_{f} | E₁ |
| 216 | AlkLEₓᵢᵢEᵢᵥ | Eᵥᵢᵢᵢ | E_{f} | E₁ |
| 217 | AlkLEₓᵢᵢ | Eᵢₓ | | E₁ |
| 218 | AlkLEₓᵢᵢEᵢ | Eᵢₓ | | E₁ |
| 219 | AlkLEₓᵢᵢEᵢᵢ | Eᵢₓ | | E₁ |
| 220 | AlkLEₓᵢᵢEᵢᵢE_{iib} | Eᵢₓ | | E₁ |
| 221 | AlkLEₓᵢᵢEᵢᵢᵢ | Eᵢₓ | | E₁ |
| 222 | AlkLEₓᵢᵢEᵢᵥ | Eᵢₓ | | E₁ |
| 223 | AlkLEₓᵢᵢ | Eᵢₓ | Eₐ | E₁ |
| 224 | AlkLEₓᵢᵢEᵢ | Eᵢₓ | Eₐ | E₁ |
| 225 | AlkLEₓᵢᵢEᵢᵢ | Eᵢₓ | Eₐ | E₁ |
| 226 | AlkLEₓᵢᵢEᵢᵢE_{iib} | Eᵢₓ | Eₐ | E₁ |
| 227 | AlkLEₓᵢᵢEᵢᵢᵢ | Eᵢₓ | Eₐ | E₁ |
| 228 | AlkLEₓᵢᵢEᵢᵥ | Eᵢₓ | Eₐ | E₁ |
| 229 | AlkLEₓᵢᵢ | Eᵢₓ | E_{b} | E₁ |
| 230 | AlkLEₓᵢᵢEᵢ | Eᵢₓ | E_{b} | E₁ |
| 231 | AlkLEₓᵢᵢEᵢᵢ | Eᵢₓ | E_{b} | E₁ |
| 232 | AlkLEₓᵢᵢEᵢᵢE_{iib} | Eᵢₓ | E_{b} | E₁ |
| 233 | AlkLEₓᵢᵢEᵢᵢᵢ | Eᵢₓ | E_{b} | E₁ |
| 234 | AlkLEₓᵢᵢEᵢᵥ | Eᵢₓ | E_{b} | E₁ |
| 235 | AlkLEₓᵢᵢ | Eᵢₓ | E_{d} | E₁ |
| 236 | AlkLEₓᵢᵢEᵢ | Eᵢₓ | E_{d} | E₁ |
| 237 | AlkLEₓᵢᵢEᵢᵢ | Eᵢₓ | E_{d} | E₁ |
| 238 | AlkLEₓᵢᵢEᵢᵢE_{iib} | Eᵢₓ | E_{d} | E₁ |
| 239 | AlkLEₓᵢᵢEᵢᵢᵢ | Eᵢₓ | E_{d} | E₁ |
| 240 | AlkLEₓᵢᵢEᵢᵥ | Eᵢₓ | E_{d} | E₁ |
| 241 | AlkLEₓᵢᵢ | Eᵢₓ | Eₑ | E₁ |
| 242 | AlkLEₓᵢᵢEᵢ | Eᵢₓ | Eₑ | E₁ |
| 243 | AlkLEₓᵢᵢEᵢᵢ | Eᵢₓ | Eₑ | E₁ |
| 244 | AlkLEₓᵢᵢEᵢᵢE_{iib} | Eᵢₓ | Eₑ | E₁ |
| 245 | AlkLEₓᵢᵢEᵢᵢᵢ | Eᵢₓ | Eₑ | E₁ |
| 246 | AlkLEₓᵢᵢEᵢᵥ | Eᵢₓ | Eₑ | E₁ |
| 247 | AlkLEₓᵢᵢ | Eᵢₓ | E_{f} | E₁ |
| 248 | AlkLEₓᵢᵢEᵢ | Eᵢₓ | E_{f} | E₁ |
| 249 | AlkLEₓᵢᵢEᵢᵢ | Eᵢₓ | E_{f} | E₁ |
| 250 | AlkLEₓᵢᵢEᵢᵢE_{iib} | Eᵢₓ | E_{f} | E₁ |
| 251 | AlkLEₓᵢᵢEᵢᵢᵢ | Eᵢₓ | E_{f} | E₁ |
| 252 | AlkLEₓᵢᵢEᵢᵥ | Eᵢₓ | E_{f} | E₁ |
| 253 | AlkLEₓᵢᵢ | Eₓ | | E₁ |
| 254 | AlkLEₓᵢᵢEᵢ | Eₓ | | E₁ |
| 255 | AlkLEₓᵢᵢEᵢᵢ | Eₓ | | E₁ |
| 256 | AlkLEₓᵢᵢEᵢᵢE_{iib} | Eₓ | | E₁ |
| 257 | AlkLEₓᵢᵢEᵢᵢᵢ | Eₓ | | E₁ |
| 258 | AlkLEₓᵢᵢEᵢᵥ | Eₓ | | E₁ |
| 259 | AlkLEₓᵢᵢ | Eₓ | Eₐ | E₁ |
| 260 | AlkLEₓᵢᵢEᵢ | Eₓ | Eₐ | E₁ |
| 261 | AlkLEₓᵢᵢEᵢᵢ | Eₓ | Eₐ | E₁ |
| 262 | AlkLEₓᵢᵢEᵢᵢE_{iib} | Eₓ | Eₐ | E₁ |
| 263 | AlkLEₓᵢᵢEᵢᵢᵢ | Eₓ | Eₐ | E₁ |
| 264 | AlkLEₓᵢᵢEᵢᵥ | Eₓ | Eₐ | E₁ |
| 265 | AlkLEₓᵢᵢ | Eₓ | E_{b} | E₁ |
| 266 | AlkLEₓᵢᵢEᵢ | Eₓ | E_{b} | E₁ |
| 267 | AlkLEₓᵢᵢEᵢᵢ | Eₓ | E_{b} | E₁ |
| 268 | AlkLEₓᵢᵢEᵢᵢE_{iib} | Eₓ | E_{b} | E₁ |
| 269 | AlkLEₓᵢᵢEᵢᵢᵢ | Eₓ | E_{b} | E₁ |
| 270 | AlkLEₓᵢᵢEᵢᵥ | Eₓ | E_{b} | E₁ |
| 271 | AlkLEₓᵢᵢ | Eₓ | E_{d} | E₁ |
| 272 | AlkLEₓᵢᵢEᵢ | Eₓ | E_{d} | E₁ |
| 273 | AlkLEₓᵢᵢEᵢᵢ | Eₓ | E_{d} | E₁ |
| 274 | AlkLEₓᵢᵢEᵢᵢE_{iib} | Eₓ | E_{d} | E₁ |
| 275 | AlkLEₓᵢᵢEᵢᵢᵢ | Eₓ | E_{d} | E₁ |
| 276 | AlkLEₓᵢᵢEᵢᵥ | Eₓ | E_{d} | E₁ |
| 277 | AlkLEₓᵢᵢ | Eₓ | Eₑ | E₁ |
| 278 | AlkLEₓᵢᵢEᵢ | Eₓ | Eₑ | E₁ |
| 279 | AlkLEₓᵢᵢEᵢᵢ | Eₓ | Eₑ | E₁ |
| 280 | AlkLEₓᵢᵢEᵢᵢE_{iib} | Eₓ | Eₑ | E₁ |
| 281 | AlkLEₓᵢᵢEᵢᵢᵢ | Eₓ | Eₑ | E₁ |
| 282 | AlkLEₓᵢᵢEᵢᵥ | Eₓ | Eₑ | E₁ |
| 283 | AlkLEₓᵢᵢ | Eₓ | E_{f} | E₁ |
| 284 | AlkLEₓᵢᵢEᵢ | Eₓ | E_{f} | E₁ |
| 285 | AlkLEₓᵢᵢEᵢᵢ | Eₓ | E_{f} | E₁ |
| 286 | AlkLEₓᵢᵢEᵢᵢE_{iib} | Eₓ | E_{f} | E₁ |
| 287 | AlkLEₓᵢᵢEᵢᵢᵢ | Eₓ | E_{f} | E₁ |
| 288 | AlkLEₓᵢᵢEᵢᵥ | Eₓ | E_{f} | E₁ |
| 289 | AlkLEₓᵢᵢ | EᵥᵢEᵥᵢᵢᵢ | | E₁ |
| 290 | AlkLEₓᵢᵢEᵢ | EᵥᵢEᵥᵢᵢᵢ | | E₁ |
| 291 | AlkLEₓᵢᵢEᵢᵢ | EᵥᵢEᵥᵢᵢᵢ | | E₁ |
| 292 | AlkLEₓᵢᵢEᵢᵢE_{iib} | EᵥᵢEᵥᵢᵢᵢ | | E₁ |
| 293 | AlkLEₓᵢᵢEᵢᵢᵢ | EᵥᵢEᵥᵢᵢᵢ | | E₁ |
| 294 | AlkLEₓᵢᵢEᵢᵥ | EᵥᵢEᵥᵢᵢᵢ | | E₁ |
| 295 | AlkLEₓᵢᵢ | EᵥᵢEᵥᵢᵢᵢ | Eₐ | E₁ |
| 296 | AlkLEₓᵢᵢEᵢ | EᵥᵢEᵥᵢᵢᵢ | Eₐ | E₁ |
| 297 | AlkLEₓᵢᵢEᵢᵢ | EᵥᵢEᵥᵢᵢᵢ | Eₐ | E₁ |
| 298 | AlkLEₓᵢᵢEᵢᵢE_{iib} | EᵥᵢEᵥᵢᵢᵢ | Eₐ | E₁ |
| 299 | AlkLEₓᵢᵢEᵢᵢᵢ | EᵥᵢEᵥᵢᵢᵢ | Eₐ | E₁ |
| 300 | AlkLEₓᵢᵢEᵢᵥ | EᵥᵢEᵥᵢᵢᵢ | Eₐ | E₁ |
| 301 | AlkLEₓᵢᵢ | EᵥᵢEᵥᵢᵢᵢ | E_{b} | E₁ |
| 302 | AlkLEₓᵢᵢEᵢ | EᵥᵢEᵥᵢᵢᵢ | E_{b} | E₁ |
| 303 | AlkLEₓᵢᵢEᵢᵢ | EᵥᵢEᵥᵢᵢᵢ | E_{b} | E₁ |
| 304 | AlkLEₓᵢᵢEᵢᵢE_{iib} | EᵥᵢEᵥᵢᵢᵢ | E_{b} | E₁ |
| 305 | AlkLEₓᵢᵢEᵢᵢᵢ | EᵥᵢEᵥᵢᵢᵢ | E_{b} | E₁ |
| 306 | AlkLEₓᵢᵢEᵢᵥ | EᵥᵢEᵥᵢᵢᵢ | E_{b} | E₁ |
| 307 | AlkLEₓᵢᵢ | EᵥᵢEᵥᵢᵢᵢ | E_{d} | E₁ |
| 308 | AlkLEₓᵢᵢEᵢ | EᵥᵢEᵥᵢᵢᵢ | E_{d} | E₁ |
| 309 | AlkLEₓᵢᵢEᵢᵢ | EᵥᵢEᵥᵢᵢᵢ | E_{d} | E₁ |
| 310 | AlkLEₓᵢᵢEᵢᵢE_{iib} | EᵥᵢEᵥᵢᵢᵢ | E_{d} | E₁ |
| 311 | AlkLEₓᵢᵢEᵢᵢᵢ | EᵥᵢEᵥᵢᵢᵢ | E_{d} | E₁ |
| 312 | AlkLEₓᵢᵢEᵢᵥ | EᵥᵢEᵥᵢᵢᵢ | E_{d} | E₁ |
| 313 | AlkLEₓᵢᵢ | EᵥᵢEᵥᵢᵢᵢ | Eₑ | E₁ |
| 314 | AlkLEₓᵢᵢEᵢ | EᵥᵢEᵥᵢᵢᵢ | Eₑ | E₁ |
| 315 | AlkLEₓᵢᵢEᵢᵢ | EᵥᵢEᵥᵢᵢᵢ | Eₑ | E₁ |
| 316 | AlkLEₓᵢᵢEᵢᵢE_{iib} | EᵥᵢEᵥᵢᵢᵢ | Eₑ | E₁ |
| 317 | AlkLEₓᵢᵢEᵢᵢᵢ | EᵥᵢEᵥᵢᵢᵢ | Eₑ | E₁ |
| 318 | AlkLEₓᵢᵢEᵢᵥ | EᵥᵢEᵥᵢᵢᵢ | Eₑ | E₁ |
| 319 | AlkLEₓᵢᵢ | EᵥᵢEᵥᵢᵢᵢ | E_{f} | E₁ |
| 320 | AlkLEₓᵢᵢEᵢ | EᵥᵢEᵥᵢᵢᵢ | E_{f} | E₁ |
| 321 | AlkLEₓᵢᵢEᵢᵢ | EᵥᵢEᵥᵢᵢᵢ | E_{f} | E₁ |
| 322 | AlkLEₓᵢᵢEᵢᵢE_{iib} | EᵥᵢEᵥᵢᵢᵢ | E_{f} | E₁ |
| 323 | AlkLEₓᵢᵢEᵢᵢᵢ | EᵥᵢEᵥᵢᵢᵢ | E_{f} | E₁ |
| 324 | AlkLEₓᵢᵢEᵢᵥ | EᵥᵢEᵥᵢᵢᵢ | E_{f} | E₁ |
| 325 | AlkLEₓᵢᵢ | E_{iib}EᵥᵢEₓ | | E₁ |
| 326 | AlkLEₓᵢᵢEᵢ | E_{iib}EᵥᵢEₓ | | E₁ |
| 327 | AlkLEₓᵢᵢEᵢᵢ | E_{iib}EᵥᵢEₓ | | E₁ |
| 328 | AlkLEₓᵢᵢEᵢᵢE_{iib} | E_{iib}EᵥᵢEₓ | | E₁ |
| 329 | AlkLEₓᵢᵢEᵢᵢᵢ | E_{iib}EᵥᵢEₓ | | E₁ |
| 330 | AlkLEₓᵢᵢEᵢᵥ | E_{iib}EᵥᵢEₓ | | E₁ |
| 331 | AlkLEₓᵢᵢ | E_{iib}EᵥᵢEₓ | Eₐ | E₁ |
| 332 | AlkLEₓᵢᵢEᵢ | E_{iib}EᵥᵢEₓ | Eₐ | E₁ |
| 333 | AlkLEₓᵢᵢEᵢᵢ | E_{iib}EᵥᵢEₓ | Eₐ | E₁ |
| 334 | AlkLEₓᵢᵢEᵢᵢE_{iib} | E_{iib}EᵥᵢEₓ | Eₐ | E₁ |
| 335 | AlkLEₓᵢᵢEᵢᵢᵢ | E_{iib}EᵥᵢEₓ | Eₐ | E₁ |
| 336 | AlkLEₓᵢᵢEᵢᵥ | E_{iib}EᵥᵢEₓ | Eₐ | E₁ |
| 337 | AlkLEₓᵢᵢ | E_{iib}EᵥᵢEₓ | E_{b} | E₁ |
| 338 | AlkLEₓᵢᵢEᵢ | E_{iib}EᵥᵢEₓ | E_{b} | E₁ |
| 339 | AlkLEₓᵢᵢEᵢᵢ | E_{iib}EᵥᵢEₓ | E_{b} | E₁ |
| 340 | AlkLEₓᵢᵢEᵢᵢE_{iib} | E_{iib}EᵥᵢEₓ | E_{b} | E₁ |
| 341 | AlkLEₓᵢᵢEᵢᵢᵢ | E_{iib}EᵥᵢEₓ | E_{b} | E₁ |
| 342 | AlkLEₓᵢᵢEᵢᵥ | E_{iib}EᵥᵢEₓ | E_{b} | E₁ |
| 343 | AlkLEₓᵢᵢ | E_{iib}EᵥᵢEₓ | E_{d} | E₁ |
| 344 | AlkLEₓᵢᵢEᵢ | E_{iib}EᵥᵢEₓ | E_{d} | E₁ |
| 345 | AlkLEₓᵢᵢEᵢᵢ | E_{iib}EᵥᵢEₓ | E_{d} | E₁ |
| 346 | AlkLEₓᵢᵢEᵢᵢE_{iib} | E_{iib}EᵥᵢEₓ | E_{d} | E₁ |
| 347 | AlkLEₓᵢᵢEᵢᵢᵢ | E_{iib}EᵥᵢEₓ | E_{d} | E₁ |
| 348 | AlkLEₓᵢᵢEᵢᵥ | E_{iib}EᵥᵢEₓ | E_{d} | E₁ |
| 349 | AlkLEₓᵢᵢ | E_{iib}EᵥᵢEₓ | Eₑ | E₁ |
| 350 | AlkLEₓᵢᵢEᵢ | E_{iib}EᵥᵢEₓ | Eₑ | E₁ |
| 351 | AlkLEₓᵢᵢEᵢᵢ | E_{iib}EᵥᵢEₓ | Eₑ | E₁ |
| 352 | AlkLEₓᵢᵢEᵢᵢE_{iib} | E_{iib}EᵥᵢEₓ | Eₑ | E₁ |
| 353 | AlkLEₓᵢᵢEᵢᵢᵢ | E_{iib}EᵥᵢEₓ | Eₑ | E₁ |
| 354 | AlkLEₓᵢᵢEᵢᵥ | E_{iib}EᵥᵢEₓ | Eₑ | E₁ |
| 355 | AlkLEₓᵢᵢ | E_{iib}EᵥᵢEₓ | E_{f} | E₁ |
| 356 | AlkLEₓᵢᵢEᵢ | E_{iib}EᵥᵢEₓ | E_{f} | E₁ |
| 357 | AlkLEₓᵢᵢEᵢᵢ | E_{iib}EᵥᵢEₓ | E_{f} | E₁ |
| 358 | AlkLEₓᵢᵢEᵢᵢE_{iib} | E_{iib}EᵥᵢEₓ | E_{f} | E₁ |
| 359 | AlkLEₓᵢᵢEᵢᵢᵢ | E_{iib}EᵥᵢEₓ | E_{f} | E₁ |
| 360 | AlkLEₓᵢᵢEᵢᵥ | E_{iib}EᵥᵢEₓ | E_{f} | E₁ |

[0197] Microorganisms (abbreviated to MO) which are very especially preferred according to the invention are outstandingly suitable for the production of terminal olefins and have increased or reduced enzymatic activities (abbreviated to E) which are described in the table hereinbelow, it being possible for these enzymatic activities additionally to be advantageously combined with an enzymatic activity described for the enzyme 3-ketoacyl-ACP (acyl carrier protein) synthase III (EC 2.3.1.41), which enzymatic activity is increased in comparison with the wild type of the microorganism, in particular the enzymatic activity of plants, preferably the enzymatic activity of plants whose seeds contain fatty acids with alkyl residues shorter than 14 C atoms and especially preferably the enzymatic activity of plants of the genera Cuphea, Elaeis, Cocos, Umbellularia and Cinnamomum and gene products selected from among AccA, AccB, AccC, AccD, AceE, AceF, Lpd, AcpP, FabA, FabB, FabD, FabF, FabG, FabH, FabI, FabZ, PanD, PanK, UdhA, PntA or PntB.

[0198] Any desired combinations of at least two of these enzymatic activities may advantageously be increased.

[0199] It may be additionally advantageous that the microorganism is equipped with an enzymatic activity which is described for the gene products selected from among TdcE, PflA, PflB, PflC, PfID, PoxB, YgfG, AckA, AckB, TdcD, Pta, LdhA, AdhE, MgsA, FdnG, FdnH, FdnI, FdhF, FdoG, FdoH, FdoI, PrpC, PrpD, PrpF, PrpB, TdcD, Pdc, PorA, PorB, PorC, PorD, AlsS, IlvB, IlvM, IlvN, IlvG, IlyI, IlvH, AlsD, ButB, Thl, ThlA, ThlB, PhaA, PhaB, Crt, BdhA, BdhB, Adc, Adh, CtfB, AtoA, AtoD, LdhL, GltA, FabR, FhuA, Dld, LldA or LldP, individually or in any desired combination, and which is reduced in comparison with the wild type of the microorganism.

| | | |
|---|---|---|
| MO | Increased E | Reduced E |

| | | | | |
|---|---|---|---|---|
| 1 | AlkL | Eₓᵢ | | |
| 2 | AlkLEᵢ | Eₓᵢ | | |
| 3 | AlkLEᵢᵢ | Eₓᵢ | | |
| 4 | AlkLEᵢᵢE_{iib} | Eₓᵢ | | |
| 5 | AlkLEᵢᵢᵢ | Eₓᵢ | | |
| 6 | AlkLEᵢᵥ | Eₓᵢ | | |
| 7 | AlkL | Eₓᵢ | Eₐ | |
| 8 | AlkLEᵢ | Eₓᵢ | Eₐ | |
| 9 | AlkLEᵢᵢ | Eₓᵢ | Eₐ | |
| 10 | AlkLEᵢᵢE_{iib} | Eₓᵢ | Eₐ | |
| 11 | AlkLEᵢᵢᵢ | Eₓᵢ | Eₐ | |
| 12 | AlkLEᵢᵥ | Eₓᵢ | Eₐ | |
| 13 | AlkL | Eₓᵢ | E_{b} | |
| 14 | AlkLEᵢ | Eₓᵢ | E_{b} | |
| 15 | AlkLEᵢᵢ | Eₓᵢ | E_{b} | |
| 16 | AlkLEᵢᵢE_{iib} | Eₓᵢ | E_{b} | |
| 17 | AlkLEᵢᵢᵢ | Eₓᵢ | E_{b} | |
| 18 | AlkLEᵢᵥ | Eₓᵢ | E_{b} | |
| 19 | AlkL | Eₓᵢ | E_{d} | |
| 20 | AlkLEᵢ | Eₓᵢ | E_{d} | |
| 21 | AlkLEᵢᵢ | Eₓᵢ | E_{d} | |
| 22 | AlkLEᵢᵢE_{iib} | Eₓᵢ | E_{d} | |
| 23 | AlkLEᵢᵢᵢ | Eₓᵢ | E_{d} | |
| 24 | AlkLEᵢᵥ | Eₓᵢ | E_{d} | |
| 25 | AlkL | Eₓᵢ | Eₑ | |
| 26 | AlkLEᵢ | Eₓᵢ | Eₑ | |
| 27 | AlkLEᵢᵢ | Eₓᵢ | Eₑ | |
| 28 | AlkLEᵢᵢE_{iib} | Eₓᵢ | Eₑ | |
| 29 | AlkLEᵢᵢᵢ | Eₓᵢ | Eₑ | |
| 30 | AlkLEᵢᵥ | Eₓᵢ | Eₑ | |
| 31 | AlkL | Eₓᵢ | E_{f} | |
| 32 | AlkLEᵢ | Eₓᵢ | E_{f} | |
| 33 | AlkLEᵢᵢ | Eₓᵢ | E_{f} | |
| 34 | AlkLEᵢᵢE_{iib} | Eₓᵢ | E_{f} | |
| 35 | AlkLEᵢᵢᵢ | Eₓᵢ | E_{f} | |
| 36 | AlkLEᵢᵥ | Eₓᵢ | E_{f} | |
| 37 | AlkL | Eₓᵢ | | E₁ |
| 38 | AlkLEᵢ | Eₓᵢ | | E₁ |
| 39 | AlkLEᵢᵢ | Eₓᵢ | | E₁ |
| 40 | AlkLEᵢᵢE_{iib} | Eₓᵢ | | E₁ |
| 41 | AlkLEᵢᵢᵢ | Eₓᵢ | | E₁ |
| 42 | AlkLEᵢᵥ | Eₓᵢ | | E₁ |
| 43 | AlkL | Eₓᵢ | Eₐ | E₁ |
| 44 | AlkLEᵢ | Eₓᵢ | Eₐ | E₁ |
| 45 | AlkLEᵢᵢ | Eₓᵢ | Eₐ | E₁ |
| 46 | AlkLEᵢᵢE_{iib} | Eₓᵢ | Eₐ | E₁ |
| 47 | AlkLEᵢᵢᵢ | Eₓᵢ | Eₐ | E₁ |
| 48 | AlkLEᵢᵥ | Eₓᵢ | Eₐ | E₁ |
| 49 | AlkL | Eₓᵢ | E_{b} | E₁ |
| 50 | AlkLEᵢ | Eₓᵢ | E_{b} | E₁ |
| 51 | AlkLEᵢᵢ | Eₓᵢ | E_{b} | E₁ |
| 52 | AlkLEᵢᵢE_{iib} | Eₓᵢ | E_{b} | E₁ |
| 53 | AlkLEᵢᵢᵢ | Eₓᵢ | E_{b} | E₁ |
| 54 | AlkLEᵢᵥ | Eₓᵢ | E_{b} | E₁ |
| 55 | AlkL | Eₓᵢ | E_{d} | E₁ |
| 56 | AlkLEᵢ | Eₓᵢ | E_{d} | E₁ |
| 57 | AlkLEᵢᵢ | Eₓᵢ | E_{d} | E₁ |
| 58 | AlkLEᵢᵢE_{iib} | Eₓᵢ | E_{d} | E₁ |
| 59 | AlkLEᵢᵢᵢ | Eₓᵢ | E_{d} | E₁ |
| 60 | AlkLEᵢᵥ | Eₓᵢ | E_{d} | E₁ |
| 61 | AlkL | Eₓᵢ | Eₑ | E₁ |
| 62 | AlkLEᵢ | Eₓᵢ | Eₑ | E₁ |
| 63 | AlkLEᵢᵢ | Eₓᵢ | Eₑ | E₁ |
| 64 | AlkLEᵢᵢE_{iib} | Eₓᵢ | Eₑ | E₁ |
| 65 | AlkLEᵢᵢᵢ | Eₓᵢ | Eₑ | E₁ |
| 66 | AlkLEᵢᵥ | Eₓᵢ | Eₑ | E₁ |
| 67 | AlkL | Eₓᵢ | E_{f} | E₁ |
| 68 | AlkLEᵢ | Eₓᵢ | E_{f} | E₁ |
| 69 | AlkLEᵢᵢ | Eₓᵢ | E_{f} | E₁ |
| 70 | AlkLEᵢᵢE_{iib} | Eₓᵢ | E_{f} | E₁ |
| 71 | AlkLEᵢᵢᵢ | Eₓᵢ | E_{f} | E₁ |
| 72 | AlkLEᵢᵥ | Eₓᵢ | E_{f} | E₁ |

[0200] Microorganisms (abbreviated to MO) which are very especially preferred according to the invention are outstandingly suitable for the production of alkan-1-amines and have increased or reduced enzymatic activities (abbreviated to E) which are described in the table hereinbelow, it being possible for these enzymatic activities additionally to be advantageously combined with an enzymatic activity described for the enzyme 3-ketoacyl-ACP (acyl carrier protein) synthase III (EC 2.3.1.41), which enzymatic activity is increased in comparison with the wild type of the microorganism, in particular the enzymatic activity of plants, preferably the enzymatic activity of plants whose seeds contain fatty acids with alkyl residues shorter than 14 C atoms and especially preferably the enzymatic activity of plants of the genera Cuphea, Elaeis, Cocos, Umbellularia and Cinnamomum and gene products selected from among AccA, AccB, AccC, AccD, AceE, AceF, Lpd, AcpP, FabA, FabB, FabD, FabF, FabG, FabH, FabI, FabZ, PanD, PanK, UdhA, PntA or PntB.

[0201] Any desired combinations of at least two of these enzymatic activities may advantageously be increased.

[0202] It may be additionally advantageous that the microorganism is equipped with an enzymatic activity which is described for the gene products selected from among TdcE, PflA, PflB, PflC, PfID, PoxB, YgfG, AckA, AckB, TdcD, Pta, LdhA, AdhE, MgsA, FdnG, FdnH, FdnI, FdhF, FdoG, FdoH, FdoI, PrpC, PrpD, PrpF, PrpB, TdcD, Pdc, PorA, PorB, PorC, PorD, AlsS, IlvB, IlvM, IlvN, IlvG, IlyI, IlvH, AlsD, ButB, Thl, ThlA, ThlB, PhaA, PhaB, Crt, BdhA, BdhB, Adc, Adh, CtfB, AtoA, AtoD, LdhL, GRA, FabR, FhuA, Dld, LldA or LldP, individually or in any desired combination, and which is reduced in comparison with the wild type of the microorganism.

| | | |
|---|---|---|
| MO | Increased E | Reduced E |

| | | | | |
|---|---|---|---|---|
| 1 | AlkLEᵥᵢᵢ | Eᵥᵢᵢᵢ | | |
| 2 | AlkLEᵥᵢᵢEᵢ | Eᵥᵢᵢᵢ | | |
| 3 | AlkLEᵥᵢᵢEᵢᵢ | Eᵥᵢᵢᵢ | | |
| 4 | AlkLEᵥᵢᵢEᵢᵢE_{iib} | Eᵥᵢᵢᵢ | | |
| 5 | AlkLEᵥᵢᵢEᵢᵢᵢ | Eᵥᵢᵢᵢ | | |
| 6 | AlkLEᵥᵢᵢEᵢᵥ | Eᵥᵢᵢᵢ | | |
| 7 | AlkLEᵥᵢᵢ | Eᵥᵢᵢᵢ | Eₐ | |
| 8 | AlkLEᵥᵢᵢEᵢ | Eᵥᵢᵢᵢ | Eₐ | |
| 9 | AlkLEᵥᵢᵢEᵢᵢ | Eᵥᵢᵢᵢ | Eₐ | |
| 10 | AlkLEᵥᵢᵢEᵢᵢE_{iib} | Eᵥᵢᵢᵢ | Eₐ | |
| 11 | AlkLEᵥᵢᵢEᵢᵢᵢ | Eᵥᵢᵢᵢ | Eₐ | |
| 12 | AlkLEᵥᵢᵢEᵢᵥ | Eᵥᵢᵢᵢ | Eₐ | |
| 13 | AlkLEᵥᵢᵢ | Eᵥᵢᵢᵢ | E_{b} | |
| 14 | AlkLEᵥᵢᵢEᵢ | Eᵥᵢᵢᵢ | E_{b} | |
| 15 | AlkLEᵥᵢᵢEᵢᵢ | Eᵥᵢᵢᵢ | E_{b} | |
| 16 | AlkLEᵥᵢᵢEᵢᵢE_{iib} | Eᵥᵢᵢᵢ | E_{b} | |
| 17 | AlkLEᵥᵢᵢEᵢᵢᵢ | Eᵥᵢᵢᵢ | E_{b} | |
| 18 | AlkLEᵥᵢᵢEᵢᵥ | Eᵥᵢᵢᵢ | E_{b} | |
| 19 | AlkLEᵥᵢᵢ | Eᵥᵢᵢᵢ | E_{d} | |
| 20 | AlkLEᵥᵢᵢEᵢ | Eᵥᵢᵢᵢ | E_{d} | |
| 21 | AlkLEᵥᵢᵢEᵢᵢ | Eᵥᵢᵢᵢ | E_{d} | |
| 22 | AlkLEᵥᵢᵢEᵢᵢE_{iib} | Eᵥᵢᵢᵢ | E_{d} | |
| 23 | AlkLEᵥᵢᵢEᵢᵢᵢ | Eᵥᵢᵢᵢ | E_{d} | |
| 24 | AlkLEᵥᵢᵢEᵢᵥ | Eᵥᵢᵢᵢ | E_{d} | |
| 25 | AlkLEᵥᵢᵢ | Eᵥᵢᵢᵢ | Eₑ | |
| 26 | AlkLEᵥᵢᵢEᵢ | Eᵥᵢᵢᵢ | Eₑ | |
| 27 | AlkLEᵥᵢᵢEᵢᵢ | Eᵥᵢᵢᵢ | Eₑ | |
| 28 | AlkLEᵥᵢᵢEᵢᵢE_{iib} | Eᵥᵢᵢᵢ | Eₑ | |
| 29 | AlkLEᵥᵢᵢEᵢᵢᵢ | Eᵥᵢᵢᵢ | Eₑ | |
| 30 | AlkLEᵥᵢᵢEᵢᵥ | Eᵥᵢᵢᵢ | Eₑ | |
| 31 | AlkLEᵥᵢᵢ | Eᵥᵢᵢᵢ | E_{f} | |
| 32 | AlkLEᵥᵢᵢEᵢ | Eᵥᵢᵢᵢ | E_{f} | |
| 33 | AlkLEᵥᵢᵢEᵢᵢ | Eᵥᵢᵢᵢ | E_{f} | |
| 34 | AlkLEᵥᵢᵢEᵢᵢE_{iib} | Eᵥᵢᵢᵢ | E_{f} | |
| 35 | AlkLEᵥᵢᵢEᵢᵢᵢ | Eᵥᵢᵢᵢ | E_{f} | |
| 36 | AlkLEᵥᵢᵢEᵢᵥ | Eᵥᵢᵢᵢ | E_{f} | |
| 37 | AlkLEᵥᵢᵢ | Eᵢₓ | | |
| 38 | AlkLEᵥᵢᵢEᵢ | Eᵢₓ | | |
| 39 | AlkLEᵥᵢᵢEᵢᵢ | Eᵢₓ | | |
| 40 | AlkLEᵥᵢᵢEᵢᵢE_{iib} | Eᵢₓ | | |
| 41 | AlkLEᵥᵢᵢEᵢᵢᵢ | Eᵢₓ | | |
| 42 | AlkLEᵥᵢᵢEᵢᵥ | Eᵢₓ | | |
| 43 | AlkLEᵥᵢᵢ | Eᵢₓ | Eₐ | |
| 44 | AlkLEᵥᵢᵢEᵢ | Eᵢₓ | Eₐ | |
| 45 | AlkLEᵥᵢᵢEᵢᵢ | Eᵢₓ | Eₐ | |
| 46 | AlkLEᵥᵢᵢEᵢᵢE_{iib} | Eᵢₓ | Eₐ | |
| 47 | AlkLEᵥᵢᵢEᵢᵢᵢ | Eᵢₓ | Eₐ | |
| 48 | AlkLEᵥᵢᵢEᵢᵥ | Eᵢₓ | Eₐ | |
| 49 | AlkLEᵥᵢᵢ | Eᵢₓ | E_{b} | |
| 50 | AlkLEᵥᵢᵢEᵢ | Eᵢₓ | E_{b} | |
| 51 | AlkLEᵥᵢᵢEᵢᵢ | Eᵢₓ | E_{b} | |
| 52 | AlkLEᵥᵢᵢEᵢᵢE_{iib} | Eᵢₓ | E_{b} | |
| 53 | AlkLEᵥᵢᵢEᵢᵢᵢ | Eᵢₓ | E_{b} | |
| 54 | AlkLEᵥᵢᵢEᵢᵥ | Eᵢₓ | E_{b} | |
| 55 | AlkLEᵥᵢᵢ | Eᵢₓ | E_{d} | |
| 56 | AlkLEᵥᵢᵢEᵢ | Eᵢₓ | E_{d} | |
| 57 | AlkLEᵥᵢᵢEᵢᵢ | Eᵢₓ | E_{d} | |
| 58 | AlkLEᵥᵢᵢEᵢᵢE_{iib} | Eᵢₓ | E_{d} | |
| 59 | AlkLEᵥᵢᵢEᵢᵢᵢ | Eᵢₓ | E_{d} | |
| 60 | AlkLEᵥᵢᵢEᵢᵥ | Eᵢₓ | E_{d} | |
| 61 | AlkLEᵥᵢᵢ | Eᵢₓ | Eₑ | |
| 62 | AlkLEᵥᵢᵢEᵢ | Eᵢₓ | Eₑ | |
| 63 | AlkLEᵥᵢᵢEᵢᵢ | Eᵢₓ | Eₑ | |
| 64 | AlkLEᵥᵢᵢEᵢᵢE_{iib} | Eᵢₓ | Eₑ | |
| 65 | AlkLEᵥᵢᵢEᵢᵢᵢ | Eᵢₓ | Eₑ | |
| 66 | AlkLEᵥᵢᵢEᵢᵥ | Eᵢₓ | Eₑ | |
| 67 | AlkLEᵥᵢᵢ | Eᵢₓ | E_{f} | |
| 68 | AlkLEᵥᵢᵢEᵢ | Eᵢₓ | E_{f} | |
| 69 | AlkLEᵥᵢᵢEᵢᵢ | Eᵢₓ | E_{f} | |
| 70 | AlkLEᵥᵢᵢEᵢᵢE_{iib} | Eᵢₓ | E_{f} | |
| 71 | AlkLEᵥᵢᵢEᵢᵢᵢ | Eᵢₓ | E_{f} | |
| 72 | AlkLEᵥᵢᵢEᵢᵥ | Eᵢₓ | E_{f} | |
| 73 | AlkLEᵥᵢᵢ | Eₓ | | |
| 74 | AlkLEᵥᵢᵢEᵢ | Eₓ | | |
| 75 | AlkLEᵥᵢᵢEᵢᵢ | Eₓ | | |
| 76 | AlkLEᵥᵢᵢEᵢᵢE_{iib} | Eₓ | | |
| 77 | AlkLEᵥᵢᵢEᵢᵢᵢ | Eₓ | | |
| 78 | AlkLEᵥᵢᵢEᵢᵥ | Eₓ | | |
| 79 | AlkLEᵥᵢᵢ | Eₓ | Eₐ | |
| 80 | AlkLEᵥᵢᵢEᵢ | Eₓ | Eₐ | |
| 81 | AlkLEᵥᵢᵢEᵢᵢ | Eₓ | Eₐ | |
| 82 | AlkLEᵥᵢᵢEᵢᵢE_{iib} | Eₓ | Eₐ | |
| 83 | AlkLEᵥᵢᵢEᵢᵢᵢ | Eₓ | Eₐ | |
| 84 | AlkLEᵥᵢᵢEᵢᵥ | Eₓ | Eₐ | |
| 85 | AlkLEᵥᵢᵢ | Eₓ | E_{b} | |
| 86 | AlkLEᵥᵢᵢEᵢ | Eₓ | E_{b} | |
| 87 | AlkLEᵥᵢᵢEᵢᵢ | Eₓ | E_{b} | |
| 88 | AlkLEᵥᵢᵢEᵢᵢE_{iib} | Eₓ | E_{b} | |
| 89 | AlkLEᵥᵢᵢEᵢᵢᵢ | Eₓ | E_{b} | |
| 90 | AlkLEᵥᵢᵢEᵢᵥ | Eₓ | E_{b} | |
| 91 | AlkLEᵥᵢᵢ | Eₓ | E_{d} | |
| 92 | AlkLEᵥᵢᵢEᵢ | Eₓ | E_{d} | |
| 93 | AlkLEᵥᵢᵢEᵢᵢ | Eₓ | E_{d} | |
| 94 | AlkLEᵥᵢᵢEᵢᵢE_{iib} | Eₓ | E_{d} | |
| 95 | AlkLEᵥᵢᵢEᵢᵢᵢ | Eₓ | E_{d} | |
| 96 | AlkLEᵥᵢᵢEᵢᵥ | Eₓ | E_{d} | |
| 97 | AlkLEᵥᵢᵢ | Eₓ | Eₑ | |
| 98 | AlkLEᵥᵢᵢEᵢ | Eₓ | Eₑ | |
| 99 | AlkLEᵥᵢᵢEᵢᵢ | Eₓ | Eₑ | |
| 100 | AlkLEᵥᵢᵢEᵢᵢE_{iib} | Eₓ | Eₑ | |
| 101 | AlkLEᵥᵢᵢEᵢᵢᵢ | Eₓ | Eₑ | |
| 102 | AlkLEᵥᵢᵢEᵢᵥ | Eₓ | Eₑ | |
| 103 | AlkLEᵥᵢᵢ | Eₓ | E_{f} | |
| 104 | AlkLEᵥᵢᵢEᵢ | Eₓ | E_{f} | |
| 105 | AlkLEᵥᵢᵢEᵢᵢ | Eₓ | E_{f} | |
| 106 | AlkLEᵥᵢᵢEᵢᵢE_{iib} | Eₓ | E_{f} | |
| 107 | AlkLEᵥᵢᵢEᵢᵢᵢ | Eₓ | E_{f} | |
| 108 | AlkLEᵥᵢᵢEᵢᵥ | Eₓ | E_{f} | |
| 109 | AlkLEᵥᵢᵢ | EᵥᵢEᵥᵢᵢᵢ | | |
| 110 | AlkLEᵥᵢᵢEᵢ | EᵥᵢEᵥᵢᵢᵢ | | |
| 111 | AlkLEᵥᵢᵢEᵢᵢ | EᵥᵢEᵥᵢᵢᵢ | | |
| 112 | AlkLEᵥᵢᵢEᵢᵢE_{iib} | EᵥᵢEᵥᵢᵢᵢ | | |
| 113 | AlkLEᵥᵢᵢEᵢᵢᵢ | EᵥᵢEᵥᵢᵢᵢ | | |
| 114 | AlkLEᵥᵢᵢEᵢᵥ | EᵥᵢEᵥᵢᵢᵢ | | |
| 115 | AlkLEᵥᵢᵢ | EᵥᵢEᵥᵢᵢᵢ | Eₐ | |
| 116 | AlkLEᵥᵢᵢEᵢ | EᵥᵢEᵥᵢᵢᵢ | Eₐ | |
| 117 | AlkLEᵥᵢᵢEᵢᵢ | EᵥᵢEᵥᵢᵢᵢ | Eₐ | |
| 118 | AlkLEᵥᵢᵢEᵢᵢE_{iib} | EᵥᵢEᵥᵢᵢᵢ | Eₐ | |
| 119 | AlkLEᵥᵢᵢEᵢᵢᵢ | EᵥᵢEᵥᵢᵢᵢ | Eₐ | |
| 120 | AlkLEᵥᵢᵢEᵢᵥ | EᵥᵢEᵥᵢᵢᵢ | Eₐ | |
| 121 | AlkLEᵥᵢᵢ | EᵥᵢEᵥᵢᵢᵢ | E_{b} | |
| 122 | AlkLEᵥᵢᵢEᵢ | EᵥᵢEᵥᵢᵢᵢ | E_{b} | |
| 123 | AlkLEᵥᵢᵢEᵢᵢ | EᵥᵢEᵥᵢᵢᵢ | E_{b} | |
| 124 | AlkLEᵥᵢᵢEᵢᵢE_{iib} | EᵥᵢEᵥᵢᵢᵢ | E_{b} | |
| 125 | AlkLEᵥᵢᵢEᵢᵢᵢ | EᵥᵢEᵥᵢᵢᵢ | E_{b} | |
| 126 | AlkLEᵥᵢᵢEᵢᵥ | EᵥᵢEᵥᵢᵢᵢ | E_{b} | |
| 127 | AlkLEᵥᵢᵢ | EᵥᵢEᵥᵢᵢᵢ | E_{d} | |
| 128 | AlkLEᵥᵢᵢEᵢ | EᵥᵢEᵥᵢᵢᵢ | E_{d} | |
| 129 | AlkLEᵥᵢᵢEᵢᵢ | EᵥᵢEᵥᵢᵢᵢ | E_{d} | |
| 130 | AlkLEᵥᵢᵢEᵢᵢE_{iib} | EᵥᵢEᵥᵢᵢᵢ | E_{d} | |
| 131 | AlkLEᵥᵢᵢEᵢᵢᵢ | EᵥᵢEᵥᵢᵢᵢ | E_{d} | |
| 132 | AlkLEᵥᵢᵢEᵢᵥ | EᵥᵢEᵥᵢᵢᵢ | E_{d} | |
| 133 | AlkLEᵥᵢᵢ | EᵥᵢEᵥᵢᵢᵢ | Eₑ | |
| 134 | AlkLEᵥᵢᵢEᵢ | EᵥᵢEᵥᵢᵢᵢ | Eₑ | |
| 135 | AlkLEᵥᵢᵢEᵢᵢ | EᵥᵢEᵥᵢᵢᵢ | Eₑ | |
| 136 | AlkLEᵥᵢᵢEᵢᵢE_{iib} | EᵥᵢEᵥᵢᵢᵢ | Eₑ | |
| 137 | AlkLEᵥᵢᵢEᵢᵢᵢ | EᵥᵢEᵥᵢᵢᵢ | Eₑ | |
| 138 | AlkLEᵥᵢᵢEᵢᵥ | EᵥᵢEᵥᵢᵢᵢ | Eₑ | |
| 139 | AlkLEᵥᵢᵢ | EᵥᵢEᵥᵢᵢᵢ | E_{f} | |
| 140 | AlkLEᵥᵢᵢEᵢ | EᵥᵢEᵥᵢᵢᵢ | E_{f} | |
| 141 | AlkLEᵥᵢᵢEᵢᵢ | EᵥᵢEᵥᵢᵢᵢ | E_{f} | |
| 142 | AlkLEᵥᵢᵢEᵢᵢE_{iib} | EᵥᵢEᵥᵢᵢᵢ | E_{f} | |
| 143 | AlkLEᵥᵢᵢEᵢᵢᵢ | EᵥᵢEᵥᵢᵢᵢ | E_{f} | |
| 144 | AlkLEᵥᵢᵢEᵢᵥ | EᵥᵢEᵥᵢᵢᵢ | E_{f} | |
| 145 | AlkLEᵥᵢᵢ | E_{iib}EᵥᵢEₓ | | |
| 146 | AlkLEᵥᵢᵢEᵢ | E_{iib}EᵥᵢEₓ | | |
| 147 | AlkLEᵥᵢᵢEᵢᵢ | E_{iib}EᵥᵢEₓ | | |
| 148 | AlkLEᵥᵢᵢEᵢᵢE_{iib} | E_{iib}EᵥᵢEₓ | | |
| 149 | AlkLEᵥᵢᵢEᵢᵢᵢ | E_{iib}EᵥᵢEₓ | | |
| 150 | AlkLEᵥᵢᵢEᵢᵥ | E_{iib}EᵥᵢEₓ | | |
| 151 | AlkLEᵥᵢᵢ | E_{iib}EᵥᵢEₓ | | |
| 152 | AlkLEᵥᵢᵢEᵢ | E_{iib}EᵥᵢEₓ | | |
| 153 | AlkLEᵥᵢᵢEᵢᵢ | E_{iib}EᵥᵢEₓ | | |
| 154 | AlkLEᵥᵢᵢEᵢᵢE_{iib} | E_{iib}EᵥᵢEₓ | | |
| 155 | AlkLEᵥᵢᵢEᵢᵢᵢ | E_{iib}EᵥᵢEₓ | | |
| 156 | AlkLEᵥᵢᵢEᵢᵥ | E_{iib}EᵥᵢEₓ | | |
| 157 | AlkLEᵥᵢᵢ | E_{iib}EᵥᵢEₓ | Eₐ | |
| 158 | AlkLEᵥᵢᵢEᵢ | E_{iib}EᵥᵢEₓ | Eₐ | |
| 159 | AlkLEᵥᵢᵢEᵢᵢ | E_{iib}EᵥᵢEₓ | Eₐ | |
| 160 | AlkLEᵥᵢᵢEᵢᵢE_{iib} | E_{iib}EᵥᵢEₓ | Eₐ | |
| 161 | AlkLEᵥᵢᵢEᵢᵢᵢ | E_{iib}EᵥᵢEₓ | Eₐ | |
| 162 | AlkLEᵥᵢᵢEᵢᵥ | E_{iib}EᵥᵢEₓ | Eₐ | |
| 163 | AlkLEᵥᵢᵢ | E_{iib}EᵥᵢEₓ | E_{b} | |
| 164 | AlkLEᵥᵢᵢEᵢ | E_{iib}EᵥᵢEₓ | E_{b} | |
| 165 | AlkLEᵥᵢᵢEᵢᵢ | E_{iib}EᵥᵢEₓ | E_{b} | |
| 166 | AlkLEᵥᵢᵢEᵢᵢE_{iib} | E_{iib}EᵥᵢEₓ | E_{b} | |
| 167 | AlkLEᵥᵢᵢEᵢᵢᵢ | E_{iib}EᵥᵢEₓ | E_{b} | |
| 168 | AlkLEᵥᵢᵢEᵢᵥ | E_{iib}EᵥᵢEₓ | E_{b} | |
| 169 | AlkLEᵥᵢᵢ | E_{iib}EᵥᵢEₓ | E_{d} | |
| 170 | AlkLEᵥᵢᵢEᵢ | E_{iib}EᵥᵢEₓ | E_{d} | |
| 171 | AlkLEᵥᵢᵢEᵢᵢ | E_{iib}EᵥᵢEₓ | E_{d} | |
| 172 | AlkLEᵥᵢᵢEᵢᵢE_{iib} | E_{iib}EᵥᵢEₓ | E_{d} | |
| 173 | AlkLEᵥᵢᵢEᵢᵢᵢ | E_{iib}EᵥᵢEₓ | E_{d} | |
| 174 | AlkLEᵥᵢᵢEᵢᵥ | E_{iib}EᵥᵢEₓ | E_{d} | |
| 175 | AlkLEᵥᵢᵢ | E_{iib}EᵥᵢEₓ | Eₑ | |
| 176 | AlkLEᵥᵢᵢEᵢ | E_{iib}EᵥᵢEₓ | Eₑ | |
| 177 | AlkLEᵥᵢᵢEᵢᵢ | E_{iib}EᵥᵢEₓ | Eₑ | |
| 178 | AlkLEᵥᵢᵢEᵢᵢE_{iib} | E_{iib}EᵥᵢEₓ | Eₑ | |
| 179 | AlkLEᵥᵢᵢEᵢᵢᵢ | E_{iib}EᵥᵢEₓ | Eₑ | |
| 180 | AlkLEᵥᵢᵢEᵢᵥ | E_{iib}EᵥᵢEₓ | Eₑ | |
| 181 | AlkLEᵥᵢᵢ | E_{iib}EᵥᵢEₓ | E_{f} | |
| 182 | AlkLEᵥᵢᵢEᵢ | E_{iib}EᵥᵢEₓ | E_{f} | |
| 183 | AlkLEᵥᵢᵢEᵢᵢ | E_{iib}EᵥᵢEₓ | E_{f} | |
| 184 | AlkLEᵥᵢᵢEᵢᵢE_{iib} | E_{iib}EᵥᵢEₓ | E_{f} | |
| 185 | AlkLEᵥᵢᵢEᵢᵢᵢ | E_{iib}EᵥᵢEₓ | E_{f} | |
| 186 | AlkLEᵥᵢᵢEᵢᵥ | E_{iib}EᵥᵢEₓ | E_{f} | |
| 187 | AlkLEᵥᵢᵢ | E_{iib}EᵥᵢEₓ | | |
| 188 | AlkLEᵥᵢᵢEᵢ | E_{iib}EᵥᵢEₓ | | |
| 189 | AlkLEᵥᵢᵢEᵢᵢ | E_{iib}EᵥᵢEₓ | | |
| 190 | AlkLEᵥᵢᵢEᵢᵢE_{iib} | E_{iib}EᵥᵢEₓ | | |
| 191 | AlkLEᵥᵢᵢEᵢᵢᵢ | E_{iib}EᵥᵢEₓ | | |
| 192 | AlkLEᵥᵢᵢEᵢᵥ | E_{iib}EᵥᵢEₓ | | |
| 193 | AlkLEₓᵢᵢᵢEᵥᵢᵢ | Eᵥᵢᵢᵢ | | |
| 194 | AlkLEₓᵢᵢᵢEᵥᵢᵢEᵢ | Eᵥᵢᵢᵢ | | |
| 195 | AlkLEₓᵢᵢᵢEᵥᵢᵢEᵢᵢ | Eᵥᵢᵢᵢ | | |
| 196 | AlkLEₓᵢᵢᵢEᵥᵢᵢEᵢᵢE_{iib} | Eᵥᵢᵢᵢ | | |
| 197 | AlkLEₓᵢᵢᵢEᵥᵢᵢEᵢᵢᵢ | Eᵥᵢᵢᵢ | | |
| 198 | AlkLEₓᵢᵢᵢEᵥᵢᵢEᵢᵥ | Eᵥᵢᵢᵢ | | |
| 199 | AlkLEₓᵢᵢᵢEᵥᵢᵢ | Eᵥᵢᵢᵢ | Eₐ | |
| 200 | AlkLEₓᵢᵢᵢEᵥᵢᵢEᵢ | Eᵥᵢᵢᵢ | Eₐ | |
| 201 | AlkLEₓᵢᵢᵢEᵥᵢᵢEᵢᵢ | Eᵥᵢᵢᵢ | Eₐ | |
| 202 | AlkLEₓᵢᵢᵢEᵥᵢᵢEᵢᵢE_{iib} | Eᵥᵢᵢᵢ | Eₐ | |
| 203 | AlkLEₓᵢᵢᵢEᵥᵢᵢEᵢᵢᵢ | Eᵥᵢᵢᵢ | Eₐ | |
| 204 | AlkLEₓᵢᵢᵢEᵥᵢᵢEᵢᵥ | Eᵥᵢᵢᵢ | Eₐ | |
| 205 | AlkLEₓᵢᵢᵢEᵥᵢᵢ | Eᵥᵢᵢᵢ | E_{b} | |
| 206 | AlkLEₓᵢᵢᵢEᵥᵢᵢEᵢ | Eᵥᵢᵢᵢ | E_{b} | |
| 207 | AlkLEₓᵢᵢᵢEᵥᵢᵢEᵢᵢ | Eᵥᵢᵢᵢ | E_{b} | |
| 208 | AlkLEₓᵢᵢᵢEᵥᵢᵢEᵢᵢE_{iib} | Eᵥᵢᵢᵢ | E_{b} | |
| 209 | AlkLEₓᵢᵢᵢEᵥᵢᵢEᵢᵢᵢ | Eᵥᵢᵢᵢ | E_{b} | |
| 210 | AlkLEₓᵢᵢᵢEᵥᵢᵢEᵢᵥ | Eᵥᵢᵢᵢ | E_{b} | |
| 211 | AlkLEₓᵢᵢᵢEᵥᵢᵢ | Eᵥᵢᵢᵢ | E_{d} | |
| 212 | AlkLEₓᵢᵢᵢEᵥᵢᵢEᵢ | Eᵥᵢᵢᵢ | E_{d} | |
| 213 | AlkLEₓᵢᵢᵢEᵥᵢᵢEᵢᵢ | Eᵥᵢᵢᵢ | E_{d} | |
| 214 | AlkLEₓᵢᵢᵢEᵥᵢᵢEᵢᵢE_{iib} | Eᵥᵢᵢᵢ | E_{d} | |
| 215 | AlkLEₓᵢᵢᵢEᵥᵢᵢEᵢᵢᵢ | Eᵥᵢᵢᵢ | E_{d} | |
| 216 | AlkLEₓᵢᵢᵢEᵥᵢᵢEᵢᵥ | Eᵥᵢᵢᵢ | E_{d} | |
| 217 | AlkLEₓᵢᵢᵢEᵥᵢᵢ | Eᵥᵢᵢᵢ | Eₑ | |
| 218 | AlkLEₓᵢᵢᵢEᵥᵢᵢEᵢ | Eᵥᵢᵢᵢ | Eₑ | |
| 219 | AlkLEₓᵢᵢᵢEᵥᵢᵢEᵢᵢ | Eᵥᵢᵢᵢ | Eₑ | |
| 220 | AlkLEₓᵢᵢᵢEᵥᵢᵢEᵢᵢE_{iib} | Eᵥᵢᵢᵢ | Eₑ | |
| 221 | AlkLEₓᵢᵢᵢEᵥᵢᵢEᵢᵢᵢ | Eᵥᵢᵢᵢ | Eₑ | |
| 222 | AlkLEₓᵢᵢᵢEᵥᵢᵢEᵢᵥ | Eᵥᵢᵢᵢ | Eₑ | |
| 223 | AlkLEₓᵢᵢᵢEᵥᵢᵢ | Eᵥᵢᵢᵢ | E_{f} | |
| 224 | AlkLEₓᵢᵢᵢEᵥᵢᵢEᵢ | Eᵥᵢᵢᵢ | E_{f} | |
| 225 | AlkLEₓᵢᵢᵢEᵥᵢᵢEᵢᵢ | Eᵥᵢᵢᵢ | E_{f} | |
| 226 | AlkLEₓᵢᵢᵢEᵥᵢᵢEᵢᵢE_{iib} | Eᵥᵢᵢᵢ | E_{f} | |
| 227 | AlkLEₓᵢᵢᵢEᵥᵢᵢEᵢᵢᵢ | Eᵥᵢᵢᵢ | E_{f} | |
| 228 | AlkLEₓᵢᵢᵢEᵥᵢᵢEᵢᵥ | Eᵥᵢᵢᵢ | E_{f} | |
| 229 | AlkLEₓᵢᵢᵢEᵥᵢᵢ | Eᵢₓ | | |
| 230 | AlkLEₓᵢᵢᵢEᵥᵢᵢEᵢ | Eᵢₓ | | |
| 231 | AlkLEₓᵢᵢᵢEᵥᵢᵢEᵢᵢ | Eᵢₓ | | |
| 232 | AlkLEₓᵢᵢᵢEᵥᵢᵢEᵢᵢE_{iib} | Eᵢₓ | | |
| 233 | AlkLEₓᵢᵢᵢEᵥᵢᵢEᵢᵢᵢ | Eᵢₓ | | |
| 234 | AlkLEₓᵢᵢᵢEᵥᵢᵢEᵢᵥ | Eᵢₓ | | |
| 235 | AlkLEₓᵢᵢᵢEᵥᵢᵢ | Eᵢₓ | Eₐ | |
| 236 | AlkLEₓᵢᵢᵢEᵥᵢᵢEᵢ | Eᵢₓ | Eₐ | |
| 237 | AlkLEₓᵢᵢᵢEᵥᵢᵢEᵢᵢ | Eᵢₓ | Eₐ | |
| 238 | AlkLEₓᵢᵢᵢEᵥᵢᵢEᵢᵢE_{iib} | Eᵢₓ | Eₐ | |
| 239 | AlkLEₓᵢᵢᵢEᵥᵢᵢEᵢᵢᵢ | Eᵢₓ | Eₐ | |
| 240 | AlkLEₓᵢᵢᵢEᵥᵢᵢEᵢᵥ | Eᵢₓ | Eₐ | |
| 241 | AlkLEₓᵢᵢᵢEᵥᵢᵢ | Eᵢₓ | E_{b} | |
| 242 | AlkLEₓᵢᵢᵢEᵥᵢᵢEᵢ | Eᵢₓ | E_{b} | |
| 243 | AlkLEₓᵢᵢᵢEᵥᵢᵢEᵢᵢ | Eᵢₓ | E_{b} | |
| 244 | AlkLEₓᵢᵢᵢEᵥᵢᵢEᵢᵢE_{iib} | Eᵢₓ | E_{b} | |
| 245 | AlkLEₓᵢᵢᵢEᵥᵢᵢEᵢᵢᵢ | Eᵢₓ | E_{b} | |
| 246 | AlkLEₓᵢᵢᵢEᵥᵢᵢEᵢᵥ | Eᵢₓ | E_{b} | |
| 247 | AlkLEₓᵢᵢᵢEᵥᵢᵢ | Eᵢₓ | E_{d} | |
| 248 | AlkLEₓᵢᵢᵢEᵥᵢᵢEᵢ | Eᵢₓ | E_{d} | |
| 249 | AlkLEₓᵢᵢᵢEᵥᵢᵢEᵢᵢ | Eᵢₓ | E_{d} | |
| 250 | AlkLEₓᵢᵢᵢEᵥᵢᵢEᵢᵢE_{iib} | Eᵢₓ | E_{d} | |
| 251 | AlkLEₓᵢᵢᵢEᵥᵢᵢEᵢᵢᵢ | Eᵢₓ | E_{d} | |
| 252 | AlkLEₓᵢᵢᵢEᵥᵢᵢEᵢᵥ | Eᵢₓ | E_{d} | |
| 253 | AlkLEₓᵢᵢᵢEᵥᵢᵢ | Eᵢₓ | Eₑ | |
| 254 | AlkLEₓᵢᵢᵢEᵥᵢᵢEᵢ | Eᵢₓ | Eₑ | |
| 255 | AlkLEₓᵢᵢᵢEᵥᵢᵢEᵢᵢ | Eᵢₓ | Eₑ | |
| 256 | AlkLEₓᵢᵢᵢEᵥᵢᵢEᵢᵢE_{iib} | Eᵢₓ | Eₑ | |
| 257 | AlkLEₓᵢᵢᵢEᵥᵢᵢEᵢᵢᵢ | Eᵢₓ | Eₑ | |
| 258 | AlkLEₓᵢᵢᵢEᵥᵢᵢEᵢᵥ | Eᵢₓ | Eₑ | |
| 259 | AlkLEₓᵢᵢᵢEᵥᵢᵢ | Eᵢₓ | E_{f} | |
| 260 | AlkLEₓᵢᵢᵢEᵥᵢᵢEᵢ | Eᵢₓ | E_{f} | |
| 261 | AlkLEₓᵢᵢᵢEᵥᵢᵢEᵢᵢ | Eᵢₓ | E_{f} | |
| 262 | AlkLEₓᵢᵢᵢEᵥᵢᵢEᵢᵢE_{iib} | Eᵢₓ | E_{f} | |
| 263 | AlkLEₓᵢᵢᵢEᵥᵢᵢEᵢᵢᵢ | Eᵢₓ | E_{f} | |
| 264 | AlkLEₓᵢᵢᵢEᵥᵢᵢEᵢᵥ | Eᵢₓ | E_{f} | |
| 265 | AlkLEₓᵢᵢᵢEᵥᵢᵢ | Eₓ | | |
| 266 | AlkLEₓᵢᵢᵢEᵥᵢᵢEᵢ | Eₓ | | |
| 267 | AlkLEₓᵢᵢᵢEᵥᵢᵢEᵢᵢ | Eₓ | | |
| 268 | AlkLEₓᵢᵢᵢEᵥᵢᵢEᵢᵢE_{iib} | Eₓ | | |
| 269 | AlkLEₓᵢᵢᵢEᵥᵢᵢEᵢᵢᵢ | Eₓ | | |
| 270 | AlkLEₓᵢᵢᵢEᵥᵢᵢEᵢᵥ | Eₓ | | |
| 271 | AlkLEₓᵢᵢᵢEᵥᵢᵢ | Eₓ | Eₐ | |
| 272 | AlkLEₓᵢᵢᵢEᵥᵢᵢEᵢ | Eₓ | Eₐ | |
| 273 | AlkLEₓᵢᵢᵢEᵥᵢᵢEᵢᵢ | Eₓ | Eₐ | |
| 274 | AlkLEₓᵢᵢᵢEᵥᵢᵢEᵢᵢE_{iib} | Eₓ | Eₐ | |
| 275 | AlkLEₓᵢᵢᵢEᵥᵢᵢEᵢᵢᵢ | Eₓ | Eₐ | |
| 276 | AlkLEₓᵢᵢᵢEᵥᵢᵢEᵢᵥ | Eₓ | Eₐ | |
| 277 | AlkLEₓᵢᵢᵢEᵥᵢᵢ | Eₓ | E_{b} | |
| 278 | AlkLEₓᵢᵢᵢEᵥᵢᵢEᵢ | Eₓ | E_{b} | |
| 279 | AlkLEₓᵢᵢᵢEᵥᵢᵢEᵢᵢ | Eₓ | E_{b} | |
| 280 | AlkLEₓᵢᵢᵢEᵥᵢᵢEᵢᵢE_{iib} | Eₓ | E_{b} | |
| 281 | AlkLEₓᵢᵢᵢEᵥᵢᵢEᵢᵢᵢ | Eₓ | E_{b} | |
| 282 | AlkLEₓᵢᵢᵢEᵥᵢᵢEᵢᵥ | Eₓ | E_{b} | |
| 283 | AlkLEₓᵢᵢᵢEᵥᵢᵢ | Eₓ | E_{d} | |
| 284 | AlkLEₓᵢᵢᵢEᵥᵢᵢEᵢ | Eₓ | E_{d} | |
| 285 | AlkLEₓᵢᵢᵢEᵥᵢᵢEᵢᵢ | Eₓ | E_{d} | |
| 286 | AlkLEₓᵢᵢᵢEᵥᵢᵢEᵢᵢE_{iib} | Eₓ | E_{d} | |
| 287 | AlkLEₓᵢᵢᵢEᵥᵢᵢEᵢᵢᵢ | Eₓ | E_{d} | |
| 288 | AlkLEₓᵢᵢᵢEᵥᵢᵢEᵢᵥ | Eₓ | E_{d} | |
| 289 | AlkLEₓᵢᵢᵢEᵥᵢᵢ | Eₓ | Eₑ | |
| 290 | AlkLEₓᵢᵢᵢEᵥᵢᵢEᵢ | Eₓ | Eₑ | |
| 291 | AlkLEₓᵢᵢᵢEᵥᵢᵢEᵢᵢ | Eₓ | Eₑ | |
| 292 | AlkLEₓᵢᵢᵢEᵥᵢᵢEᵢᵢE_{iib} | Eₓ | Eₑ | |
| 293 | AlkLEₓᵢᵢᵢEᵥᵢᵢEᵢᵢᵢ | Eₓ | Eₑ | |
| 294 | AlkLEₓᵢᵢᵢEᵥᵢᵢEᵢᵥ | Eₓ | Eₑ | |
| 295 | AlkLEₓᵢᵢᵢEᵥᵢᵢ | Eₓ | E_{f} | |
| 296 | AlkLEₓᵢᵢᵢEᵥᵢᵢEᵢ | Eₓ | E_{f} | |
| 297 | AlkLEₓᵢᵢᵢEᵥᵢᵢEᵢᵢ | Eₓ | E_{f} | |
| 298 | AlkLEₓᵢᵢᵢEᵥᵢᵢEᵢᵢE_{iib} | Eₓ | E_{f} | |
| 299 | AlkLEₓᵢᵢᵢEᵥᵢᵢEᵢᵢᵢ | Eₓ | E_{f} | |
| 300 | AlkLEₓᵢᵢᵢEᵥᵢᵢEᵢᵥ | Eₓ | E_{f} | |
| 301 | AlkLEₓᵢᵢᵢEᵥᵢᵢ | EᵥᵢEᵥᵢᵢᵢ | | |
| 302 | AlkLEₓᵢᵢᵢEᵥᵢᵢEᵢ | EᵥᵢEᵥᵢᵢᵢ | | |
| 303 | AlkLEₓᵢᵢᵢEᵥᵢᵢEᵢᵢ | EᵥᵢEᵥᵢᵢᵢ | | |
| 304 | AlkLEₓᵢᵢᵢEᵥᵢᵢEᵢᵢE_{iib} | EᵥᵢEᵥᵢᵢᵢ | | |
| 305 | AlkLEₓᵢᵢᵢEᵥᵢᵢEᵢᵢᵢ | EᵥᵢEᵥᵢᵢᵢ | | |
| 306 | AlkLEₓᵢᵢᵢEᵥᵢᵢEᵢᵥ | EᵥᵢEᵥᵢᵢᵢ | | |
| 307 | AlkLEₓᵢᵢᵢEᵥᵢᵢ | EᵥᵢEᵥᵢᵢᵢ | Eₐ | |
| 308 | AlkLEₓᵢᵢᵢEᵥᵢᵢEᵢ | EᵥᵢEᵥᵢᵢᵢ | Eₐ | |
| 309 | AlkLEₓᵢᵢᵢEᵥᵢᵢEᵢᵢ | EᵥᵢEᵥᵢᵢᵢ | Eₐ | |
| 310 | AlkLEₓᵢᵢᵢEᵥᵢᵢEᵢᵢE_{iib} | EᵥᵢEᵥᵢᵢᵢ | Eₐ | |
| 311 | AlkLEₓᵢᵢᵢEᵥᵢᵢEᵢᵢᵢ | EᵥᵢEᵥᵢᵢᵢ | Eₐ | |
| 312 | AlkLEₓᵢᵢᵢEᵥᵢᵢEᵢᵥ | EᵥᵢEᵥᵢᵢᵢ | Eₐ | |
| 313 | AlkLEₓᵢᵢᵢEᵥᵢᵢ | EᵥᵢEᵥᵢᵢᵢ | E_{b} | |
| 314 | AlkLEₓᵢᵢᵢEᵥᵢᵢEᵢ | EᵥᵢEᵥᵢᵢᵢ | E_{b} | |
| 315 | AlkLEₓᵢᵢᵢEᵥᵢᵢEᵢᵢ | EᵥᵢEᵥᵢᵢᵢ | E_{b} | |
| 316 | AlkLEₓᵢᵢᵢEᵥᵢᵢEᵢᵢE_{iib} | EᵥᵢEᵥᵢᵢᵢ | E_{b} | |
| 317 | AlkLEₓᵢᵢᵢEᵥᵢᵢEᵢᵢᵢ | EᵥᵢEᵥᵢᵢᵢ | E_{b} | |
| 318 | AlkLEₓᵢᵢᵢEᵥᵢᵢEᵢᵥ | EᵥᵢEᵥᵢᵢᵢ | E_{b} | |
| 319 | AlkLEₓᵢᵢᵢEᵥᵢᵢ | EᵥᵢEᵥᵢᵢᵢ | E_{d} | |
| 320 | AlkLEₓᵢᵢᵢEᵥᵢᵢEᵢ | EᵥᵢEᵥᵢᵢᵢ | E_{d} | |
| 321 | AlkLEₓᵢᵢᵢEᵥᵢᵢEᵢᵢ | EᵥᵢEᵥᵢᵢᵢ | E_{d} | |
| 322 | AlkLEₓᵢᵢᵢEᵥᵢᵢEᵢᵢE_{iib} | EᵥᵢEᵥᵢᵢᵢ | E_{d} | |
| 323 | AlkLEₓᵢᵢᵢEᵥᵢᵢEᵢᵢᵢ | EᵥᵢEᵥᵢᵢᵢ | E_{d} | |
| 324 | AlkLEₓᵢᵢᵢEᵥᵢᵢEᵢᵥ | EᵥᵢEᵥᵢᵢᵢ | E_{d} | |
| 325 | AlkLEₓᵢᵢᵢEᵥᵢᵢ | EᵥᵢEᵥᵢᵢᵢ | Eₑ | |
| 326 | AlkLEₓᵢᵢᵢEᵥᵢᵢEᵢ | EᵥᵢEᵥᵢᵢᵢ | Eₑ | |
| 327 | AlkLEₓᵢᵢᵢEᵥᵢᵢEᵢᵢ | EᵥᵢEᵥᵢᵢᵢ | Eₑ | |
| 328 | AlkLEₓᵢᵢᵢEᵥᵢᵢEᵢᵢE_{iib} | EᵥᵢEᵥᵢᵢᵢ | Eₑ | |
| 329 | AlkLEₓᵢᵢᵢEᵥᵢᵢEᵢᵢᵢ | EᵥᵢEᵥᵢᵢᵢ | Eₑ | |
| 330 | AlkLEₓᵢᵢᵢEᵥᵢᵢEᵢᵥ | EᵥᵢEᵥᵢᵢᵢ | Eₑ | |
| 331 | AlkLEₓᵢᵢᵢEᵥᵢᵢ | EᵥᵢEᵥᵢᵢᵢ | E_{f} | |
| 332 | AlkLEₓᵢᵢᵢEᵥᵢᵢEᵢ | EᵥᵢEᵥᵢᵢᵢ | E_{f} | |
| 333 | AlkLEₓᵢᵢᵢEᵥᵢᵢEᵢᵢ | EᵥᵢEᵥᵢᵢᵢ | E_{f} | |
| 334 | AlkLEₓᵢᵢᵢEᵥᵢᵢEᵢᵢE_{iib} | EᵥᵢEᵥᵢᵢᵢ | E_{f} | |
| 335 | AlkLEₓᵢᵢᵢEᵥᵢᵢEᵢᵢᵢ | EᵥᵢEᵥᵢᵢᵢ | E_{f} | |
| 336 | AlkLEₓᵢᵢᵢEᵥᵢᵢEᵢᵥ | EᵥᵢEᵥᵢᵢᵢ | E_{f} | |
| 337 | AlkLEₓᵢᵢᵢEᵥᵢᵢ | E_{iib}EᵥᵢEₓ | | |
| 338 | AlkLEₓᵢᵢᵢEᵥᵢᵢEᵢ | E_{iib}EᵥᵢEₓ | | |
| 339 | AlkLEₓᵢᵢᵢEᵥᵢᵢEᵢᵢ | E_{iib}EᵥᵢEₓ | | |
| 340 | AlkLEₓᵢᵢᵢEᵥᵢᵢEᵢᵢE_{iib} | E_{iib}EᵥᵢEₓ | | |
| 341 | AlkLEₓᵢᵢᵢEᵥᵢᵢEᵢᵢᵢ | E_{iib}EᵥᵢEₓ | | |
| 342 | AlkLEₓᵢᵢᵢEᵥᵢᵢEᵢᵥ | E_{iib}EᵥᵢEₓ | | |
| 343 | AlkLEₓᵢᵢᵢEᵥᵢᵢ | E_{iib}EᵥᵢEₓ | Eₐ | |
| 344 | AlkLEₓᵢᵢᵢEᵥᵢᵢEᵢ | E_{iib}EᵥᵢEₓ | Eₐ | |
| 345 | AlkLEₓᵢᵢᵢEᵥᵢᵢEᵢᵢ | E_{iib}EᵥᵢEₓ | Eₐ | |
| 346 | AlkLEₓᵢᵢᵢEᵥᵢᵢEᵢᵢE_{iib} | E_{iib}EᵥᵢEₓ | Eₐ | |
| 347 | AlkLEₓᵢᵢᵢEᵥᵢᵢEᵢᵢᵢ | E_{iib}EᵥᵢEₓ | Eₐ | |
| 348 | AlkLEₓᵢᵢᵢEᵥᵢᵢEᵢᵥ | E_{iib}EᵥᵢEₓ | Eₐ | |
| 349 | AlkLEₓᵢᵢᵢEᵥᵢᵢ | E_{iib}EᵥᵢEₓ | E_{b} | |
| 350 | AlkLEₓᵢᵢᵢEᵥᵢᵢEᵢ | E_{iib}EᵥᵢEₓ | E_{b} | |
| 351 | AlkLEₓᵢᵢᵢEᵥᵢᵢEᵢᵢ | E_{iib}EᵥᵢEₓ | E_{b} | |
| 352 | AlkLEₓᵢᵢᵢEᵥᵢᵢEᵢᵢE_{iib} | E_{iib}EᵥᵢEₓ | E_{b} | |
| 353 | AlkLEₓᵢᵢᵢEᵥᵢᵢEᵢᵢᵢ | E_{iib}EᵥᵢEₓ | E_{b} | |
| 354 | AlkLEₓᵢᵢᵢEᵥᵢᵢEᵢᵥ | E_{iib}EᵥᵢEₓ | E_{b} | |
| 355 | AlkLEₓᵢᵢᵢEᵥᵢᵢ | E_{iib}EᵥᵢEₓ | E_{d} | |
| 356 | AlkLEₓᵢᵢᵢEᵥᵢᵢEᵢ | E_{iib}EᵥᵢEₓ | E_{d} | |
| 357 | AlkLEₓᵢᵢᵢEᵥᵢᵢEᵢᵢ | E_{iib}EᵥᵢEₓ | E_{d} | |
| 358 | AlkLEₓᵢᵢᵢEᵥᵢᵢEᵢᵢE_{iib} | E_{iib}EᵥᵢEₓ | E_{d} | |
| 359 | AlkLEₓᵢᵢᵢEᵥᵢᵢEᵢᵢᵢ | E_{iib}EᵥᵢEₓ | E_{d} | |
| 360 | AlkLEₓᵢᵢᵢEᵥᵢᵢEᵢᵥ | E_{iib}EᵥᵢEₓ | E_{d} | |
| 361 | AlkLEₓᵢᵢᵢEᵥᵢᵢ | E_{iib}EᵥᵢEₓ | Eₑ | |
| 362 | AlkLEₓᵢᵢᵢEᵥᵢᵢEᵢ | E_{iib}EᵥᵢEₓ | Eₑ | |
| 363 | AlkLEₓᵢᵢᵢEᵥᵢᵢEᵢᵢ | E_{iib}EᵥᵢEₓ | Eₑ | |
| 364 | AlkLEₓᵢᵢᵢEᵥᵢᵢEᵢᵢE_{iib} | E_{iib}EᵥᵢEₓ | Eₑ | |
| 365 | AlkLEₓᵢᵢᵢEᵥᵢᵢEᵢᵢᵢ | E_{iib}EᵥᵢEₓ | Eₑ | |
| 366 | AlkLEₓᵢᵢᵢEᵥᵢᵢEᵢᵥ | E_{iib}EᵥᵢEₓ | Eₑ | |
| 367 | AlkLEₓᵢᵢᵢEᵥᵢᵢ | E_{iib}EᵥᵢEₓ | E_{f} | |
| 368 | AlkLEₓᵢᵢᵢEᵥᵢᵢEᵢ | E_{iib}EᵥᵢEₓ | E_{f} | |
| 369 | AlkLEₓᵢᵢᵢEᵥᵢᵢEᵢᵢ | E_{iib}EᵥᵢEₓ | E_{f} | |
| 370 | AlkLEₓᵢᵢᵢEᵥᵢᵢEᵢᵢE_{iib} | E_{iib}EᵥᵢEₓ | E_{f} | |
| 371 | AlkLEₓᵢᵢᵢEᵥᵢᵢEᵢᵢᵢ | E_{iib}EᵥᵢEₓ | E_{f} | |
| 372 | AlkLEₓᵢᵢᵢEᵥᵢᵢEᵢᵥ | E_{iib}EᵥᵢEₓ | E_{f} | |
| 373 | AlkLEᵥᵢᵢ | Eᵥᵢᵢᵢ | | E₁ |
| 374 | AlkLEᵥᵢᵢEᵢ | Eᵥᵢᵢᵢ | | E₁ |
| 375 | AlkLEᵥᵢᵢEᵢᵢ | Eᵥᵢᵢᵢ | | E₁ |
| 376 | AlkLEᵥᵢᵢEᵢᵢE_{iib} | Eᵥᵢᵢᵢ | | E₁ |
| 377 | AlkLEᵥᵢᵢEᵢᵢᵢ | Eᵥᵢᵢᵢ | | E₁ |
| 378 | AlkLEᵥᵢᵢEᵢᵥ | Eᵥᵢᵢᵢ | | E₁ |
| 379 | AlkLEᵥᵢᵢ | Eᵥᵢᵢᵢ | Eₐ | E₁ |
| 380 | AlkLEᵥᵢᵢEᵢ | Eᵥᵢᵢᵢ | Eₐ | E₁ |
| 381 | AlkLEᵥᵢᵢEᵢᵢ | Eᵥᵢᵢᵢ | Eₐ | E₁ |
| 382 | AlkLEᵥᵢᵢEᵢᵢE_{iib} | Eᵥᵢᵢᵢ | Eₐ | E₁ |
| 383 | AlkLEᵥᵢᵢEᵢᵢᵢ | Eᵥᵢᵢᵢ | Eₐ | E₁ |
| 384 | AlkLEᵥᵢᵢEᵢᵥ | Eᵥᵢᵢᵢ | Eₐ | E₁ |
| 385 | AlkLEᵥᵢᵢ | Eᵥᵢᵢᵢ | E_{b} | E₁ |
| 386 | AlkLEᵥᵢᵢEᵢ | Eᵥᵢᵢᵢ | E_{b} | E₁ |
| 387 | AlkLEᵥᵢᵢEᵢᵢ | Eᵥᵢᵢᵢ | E_{b} | E₁ |
| 388 | AlkLEᵥᵢᵢEᵢᵢE_{iib} | Eᵥᵢᵢᵢ | E_{b} | E₁ |
| 389 | AlkLEᵥᵢᵢEᵢᵢᵢ | Eᵥᵢᵢᵢ | E_{b} | E₁ |
| 390 | AlkLEᵥᵢᵢEᵢᵥ | Eᵥᵢᵢᵢ | E_{b} | E₁ |
| 391 | AlkLEᵥᵢᵢ | Eᵥᵢᵢᵢ | E_{d} | E₁ |
| 392 | AlkLEᵥᵢᵢEᵢ | Eᵥᵢᵢᵢ | E_{d} | E₁ |
| 393 | AlkLEᵥᵢᵢEᵢᵢ | Eᵥᵢᵢᵢ | E_{d} | E₁ |
| 394 | AlkLEᵥᵢᵢEᵢᵢE_{iib} | Eᵥᵢᵢᵢ | E_{d} | E₁ |
| 395 | AlkLEᵥᵢᵢEᵢᵢᵢ | Eᵥᵢᵢᵢ | E_{d} | E₁ |
| 396 | AlkLEᵥᵢᵢEᵢᵥ | Eᵥᵢᵢᵢ | E_{d} | E₁ |
| 397 | AlkLEᵥᵢᵢ | Eᵥᵢᵢᵢ | Eₑ | E₁ |
| 398 | AlkLEᵥᵢᵢEᵢ | Eᵥᵢᵢᵢ | Eₑ | E₁ |
| 399 | AlkLEᵥᵢᵢEᵢᵢ | Eᵥᵢᵢᵢ | Eₑ | E₁ |
| 400 | AlkLEᵥᵢᵢEᵢᵢE_{iib} | Eᵥᵢᵢᵢ | Eₑ | E₁ |
| 401 | AlkLEᵥᵢᵢEᵢᵢᵢ | Eᵥᵢᵢᵢ | Eₑ | E₁ |
| 402 | AlkLEᵥᵢᵢEᵢᵥ | Eᵥᵢᵢᵢ | Eₑ | E₁ |
| 403 | AlkLEᵥᵢᵢ | Eᵥᵢᵢᵢ | E_{f} | E₁ |
| 404 | AlkLEᵥᵢᵢEᵢ | Eᵥᵢᵢᵢ | E_{f} | E₁ |
| 405 | AlkLEᵥᵢᵢEᵢᵢ | Eᵥᵢᵢᵢ | E_{f} | E₁ |
| 406 | AlkLEᵥᵢᵢEᵢᵢE_{iib} | Eᵥᵢᵢᵢ | E_{f} | E₁ |
| 407 | AlkLEᵥᵢᵢEᵢᵢᵢ | Eᵥᵢᵢᵢ | E_{f} | E₁ |
| 408 | AlkLEᵥᵢᵢEᵢᵥ | Eᵥᵢᵢᵢ | E_{f} | E₁ |
| 409 | AlkLEᵥᵢᵢ | Eᵢₓ | | E₁ |
| 410 | AlkLEᵥᵢᵢEᵢ | Eᵢₓ | | E₁ |
| 411 | AlkLEᵥᵢᵢEᵢᵢ | Eᵢₓ | | E₁ |
| 412 | AlkLEᵥᵢᵢEᵢᵢE_{iib} | Eᵢₓ | | E₁ |
| 413 | AlkLEᵥᵢᵢEᵢᵢᵢ | Eᵢₓ | | E₁ |
| 414 | AlkLEᵥᵢᵢEᵢᵥ | Eᵢₓ | | E₁ |
| 415 | AlkLEᵥᵢᵢ | Eᵢₓ | Eₐ | E₁ |
| 416 | AlkLEᵥᵢᵢEᵢ | Eᵢₓ | Eₐ | E₁ |
| 417 | AlkLEᵥᵢᵢEᵢᵢ | Eᵢₓ | Eₐ | E₁ |
| 418 | AlkLEᵥᵢᵢEᵢᵢE_{iib} | Eᵢₓ | Eₐ | E₁ |
| 419 | AlkLEᵥᵢᵢEᵢᵢᵢ | Eᵢₓ | Eₐ | E₁ |
| 420 | AlkLEᵥᵢᵢEᵢᵥ | Eᵢₓ | Eₐ | E₁ |
| 421 | AlkLEᵥᵢᵢ | Eᵢₓ | E_{b} | E₁ |
| 422 | AlkLEᵥᵢᵢEᵢ | Eᵢₓ | E_{b} | E₁ |
| 423 | AlkLEᵥᵢᵢEᵢᵢ | Eᵢₓ | E_{b} | E₁ |
| 424 | AlkLEᵥᵢᵢEᵢᵢE_{iib} | Eᵢₓ | E_{b} | E₁ |
| 425 | AlkLEᵥᵢᵢEᵢᵢᵢ | Eᵢₓ | E_{b} | E₁ |
| 426 | AlkLEᵥᵢᵢEᵢᵥ | Eᵢₓ | E_{b} | E₁ |
| 427 | AlkLEᵥᵢᵢ | Eᵢₓ | E_{d} | E₁ |
| 428 | AlkLEᵥᵢᵢEᵢ | Eᵢₓ | E_{d} | E₁ |
| 429 | AlkLEᵥᵢᵢEᵢᵢ | Eᵢₓ | E_{d} | E₁ |
| 430 | AlkLEᵥᵢᵢEᵢᵢE_{iib} | Eᵢₓ | E_{d} | E₁ |
| 431 | AlkLEᵥᵢᵢEᵢᵢᵢ | Eᵢₓ | E_{d} | E₁ |
| 432 | AlkLEᵥᵢᵢEᵢᵥ | Eᵢₓ | E_{d} | E₁ |
| 433 | AlkLEᵥᵢᵢ | Eᵢₓ | Eₑ | E₁ |
| 434 | AlkLEᵥᵢᵢEᵢ | Eᵢₓ | Eₑ | E₁ |
| 435 | AlkLEᵥᵢᵢEᵢᵢ | Eᵢₓ | Eₑ | E₁ |
| 436 | AlkLEᵥᵢᵢEᵢᵢE_{iib} | Eᵢₓ | Eₑ | E₁ |
| 437 | AlkLEᵥᵢᵢEᵢᵢᵢ | Eᵢₓ | Eₑ | E₁ |
| 438 | AlkLEᵥᵢᵢEᵢᵥ | Eᵢₓ | Eₑ | E₁ |
| 439 | AlkLEᵥᵢᵢ | Eᵢₓ | E_{f} | E₁ |
| 440 | AlkLEᵥᵢᵢEᵢ | Eᵢₓ | E_{f} | E₁ |
| 441 | AlkLEᵥᵢᵢEᵢᵢ | Eᵢₓ | E_{f} | E₁ |
| 442 | AlkLEᵥᵢᵢEᵢᵢE_{iib} | Eᵢₓ | E_{f} | E₁ |
| 443 | AlkLEᵥᵢᵢEᵢᵢᵢ | Eᵢₓ | E_{f} | E₁ |
| 444 | AlkLEᵥᵢᵢEᵢᵥ | Eᵢₓ | E_{f} | E₁ |
| 445 | AlkLEᵥᵢᵢ | Eₓ | | E₁ |
| 446 | AlkLEᵥᵢᵢEᵢ | Eₓ | | E₁ |
| 447 | AlkLEᵥᵢᵢEᵢᵢ | Eₓ | | E₁ |
| 448 | AlkLEᵥᵢᵢEᵢᵢE_{iib} | Eₓ | | E₁ |
| 449 | AlkLEᵥᵢᵢEᵢᵢᵢ | Eₓ | | E₁ |
| 450 | AlkLEᵥᵢᵢEᵢᵥ | Eₓ | | E₁ |
| 451 | AlkLEᵥᵢᵢ | Eₓ | Eₐ | E₁ |
| 452 | AlkLEᵥᵢᵢEᵢ | Eₓ | Eₐ | E₁ |
| 453 | AlkLEᵥᵢᵢEᵢᵢ | Eₓ | Eₐ | E₁ |
| 454 | AlkLEᵥᵢᵢEᵢᵢE_{iib} | Eₓ | Eₐ | E₁ |
| 455 | AlkLEᵥᵢᵢEᵢᵢᵢ | Eₓ | Eₐ | E₁ |
| 456 | AlkLEᵥᵢᵢEᵢᵥ | Eₓ | Eₐ | E₁ |
| 457 | AlkLEᵥᵢᵢ | Eₓ | E_{b} | E₁ |
| 458 | AlkLEᵥᵢᵢEᵢ | Eₓ | E_{b} | E₁ |
| 459 | AlkLEᵥᵢᵢEᵢᵢ | Eₓ | E_{b} | E₁ |
| 460 | AlkLEᵥᵢᵢEᵢᵢE_{iib} | Eₓ | E_{b} | E₁ |
| 461 | AlkLEᵥᵢᵢEᵢᵢᵢ | Eₓ | E_{b} | E₁ |
| 462 | AlkLEᵥᵢᵢEᵢᵥ | Eₓ | E_{b} | E₁ |
| 463 | AlkLEᵥᵢᵢ | Eₓ | E_{d} | E₁ |
| 464 | AlkLEᵥᵢᵢEᵢ | Eₓ | E_{d} | E₁ |
| 465 | AlkLEᵥᵢᵢEᵢᵢ | Eₓ | E_{d} | E₁ |
| 466 | AlkLEᵥᵢᵢEᵢᵢE_{iib} | Eₓ | E_{d} | E₁ |
| 467 | AlkLEᵥᵢᵢEᵢᵢᵢ | Eₓ | E_{d} | E₁ |
| 468 | AlkLEᵥᵢᵢEᵢᵥ | Eₓ | E_{d} | E₁ |
| 469 | AlkLEᵥᵢᵢ | Eₓ | Eₑ | E₁ |
| 470 | AlkLEᵥᵢᵢEᵢ | Eₓ | Eₑ | E₁ |
| 471 | AlkLEᵥᵢᵢEᵢᵢ | Eₓ | Eₑ | E₁ |
| 472 | AlkLEᵥᵢᵢEᵢᵢE_{iib} | Eₓ | Eₑ | E₁ |
| 473 | AlkLEᵥᵢᵢEᵢᵢᵢ | Eₓ | Eₑ | E₁ |
| 474 | AlkLEᵥᵢᵢEᵢᵥ | Eₓ | Eₑ | E₁ |
| 475 | AlkLEᵥᵢᵢ | Eₓ | E_{f} | E₁ |
| 476 | AlkLEᵥᵢᵢEᵢ | Eₓ | E_{f} | E₁ |
| 477 | AlkLEᵥᵢᵢEᵢᵢ | Eₓ | E_{f} | E₁ |
| 478 | AlkLEᵥᵢᵢEᵢᵢE_{iib} | Eₓ | E_{f} | E₁ |
| 479 | AlkLEᵥᵢᵢEᵢᵢᵢ | Eₓ | E_{f} | E₁ |
| 480 | AlkLEᵥᵢᵢEᵢᵥ | Eₓ | E_{f} | E₁ |
| 481 | AlkLEᵥᵢᵢ | EᵥᵢEᵥᵢᵢᵢ | | E₁ |
| 482 | AlkLEᵥᵢᵢEᵢ | EᵥᵢEᵥᵢᵢᵢ | | E₁ |
| 483 | AlkLEᵥᵢᵢEᵢᵢ | EᵥᵢEᵥᵢᵢᵢ | | E₁ |
| 484 | AlkLEᵥᵢᵢEᵢᵢE_{iib} | EᵥᵢEᵥᵢᵢᵢ | | E₁ |
| 485 | AlkLEᵥᵢᵢEᵢᵢᵢ | EᵥᵢEᵥᵢᵢᵢ | | E₁ |
| 486 | AlkLEᵥᵢᵢEᵢᵥ | EᵥᵢEᵥᵢᵢᵢ | | E₁ |
| 487 | AlkLEᵥᵢᵢ | EᵥᵢEᵥᵢᵢᵢ | Eₐ | E₁ |
| 488 | AlkLEᵥᵢᵢEᵢ | EᵥᵢEᵥᵢᵢᵢ | Eₐ | E₁ |
| 489 | AlkLEᵥᵢᵢEᵢᵢ | EᵥᵢEᵥᵢᵢᵢ | Eₐ | E₁ |
| 490 | AlkLEᵥᵢᵢEᵢᵢE_{iib} | EᵥᵢEᵥᵢᵢᵢ | Eₐ | E₁ |
| 491 | AlkLEᵥᵢᵢEᵢᵢᵢ | EᵥᵢEᵥᵢᵢᵢ | Eₐ | E₁ |
| 492 | AlkLEᵥᵢᵢEᵢᵥ | EᵥᵢEᵥᵢᵢᵢ | Eₐ | E₁ |
| 493 | AlkLEᵥᵢᵢ | EᵥᵢEᵥᵢᵢᵢ | E_{b} | E₁ |
| 494 | AlkLEᵥᵢᵢEᵢ | EᵥᵢEᵥᵢᵢᵢ | E_{b} | E₁ |
| 495 | AlkLEᵥᵢᵢEᵢᵢ | EᵥᵢEᵥᵢᵢᵢ | E_{b} | E₁ |
| 496 | AlkLEᵥᵢᵢEᵢᵢE_{iib} | EᵥᵢEᵥᵢᵢᵢ | E_{b} | E₁ |
| 497 | AlkLEᵥᵢᵢEᵢᵢᵢ | EᵥᵢEᵥᵢᵢᵢ | E_{b} | E₁ |
| 498 | AlkLEᵥᵢᵢEᵢᵥ | EᵥᵢEᵥᵢᵢᵢ | E_{b} | E₁ |
| 499 | AlkLEᵥᵢᵢ | EᵥᵢEᵥᵢᵢᵢ | E_{d} | E₁ |
| 500 | AlkLEᵥᵢᵢEᵢ | EᵥᵢEᵥᵢᵢᵢ | E_{d} | E₁ |
| 501 | AlkLEᵥᵢᵢEᵢᵢ | EᵥᵢEᵥᵢᵢᵢ | E_{d} | E₁ |
| 502 | AlkLEᵥᵢᵢEᵢᵢE_{iib} | EᵥᵢEᵥᵢᵢᵢ | E_{d} | E₁ |
| 503 | AlkLEᵥᵢᵢEᵢᵢᵢ | EᵥᵢEᵥᵢᵢᵢ | E_{d} | E₁ |
| 504 | AlkLEᵥᵢᵢEᵢᵥ | EᵥᵢEᵥᵢᵢᵢ | E_{d} | E₁ |
| 505 | AlkLEᵥᵢᵢ | EᵥᵢEᵥᵢᵢᵢ | Eₑ | E₁ |
| 506 | AlkLEᵥᵢᵢEᵢ | EᵥᵢEᵥᵢᵢᵢ | Eₑ | E₁ |
| 507 | AlkLEᵥᵢᵢEᵢᵢ | EᵥᵢEᵥᵢᵢᵢ | Eₑ | E₁ |
| 508 | AlkLEᵥᵢᵢEᵢᵢE_{iib} | EᵥᵢEᵥᵢᵢᵢ | Eₑ | E₁ |
| 509 | AlkLEᵥᵢᵢEᵢᵢᵢ | EᵥᵢEᵥᵢᵢᵢ | Eₑ | E₁ |
| 510 | AlkLEᵥᵢᵢEᵢᵥ | EᵥᵢEᵥᵢᵢᵢ | Eₑ | E₁ |
| 511 | AlkLEᵥᵢᵢ | EᵥᵢEᵥᵢᵢᵢ | E_{f} | E₁ |
| 512 | AlkLEᵥᵢᵢEᵢ | EᵥᵢEᵥᵢᵢᵢ | E_{f} | E₁ |
| 513 | AlkLEᵥᵢᵢEᵢᵢ | EᵥᵢEᵥᵢᵢᵢ | E_{f} | E₁ |
| 514 | AlkLEᵥᵢᵢEᵢᵢE_{iib} | EᵥᵢEᵥᵢᵢᵢ | E_{f} | E₁ |
| 515 | AlkLEᵥᵢᵢEᵢᵢᵢ | EᵥᵢEᵥᵢᵢᵢ | E_{f} | E₁ |
| 516 | AlkLEᵥᵢᵢEᵢᵥ | EᵥᵢEᵥᵢᵢᵢ | E_{f} | E₁ |
| 517 | AlkLEᵥᵢᵢ | E_{iib}EᵥᵢEₓ | | E₁ |
| 518 | AlkLEᵥᵢᵢEᵢ | E_{iib}EᵥᵢEₓ | | E₁ |
| 519 | AlkLEᵥᵢᵢEᵢᵢ | E_{iib}EᵥᵢEₓ | | E₁ |
| 520 | AlkLEᵥᵢᵢEᵢᵢE_{iib} | E_{iib}EᵥᵢEₓ | | E₁ |
| 521 | AlkLEᵥᵢᵢEᵢᵢᵢ | E_{iib}EᵥᵢEₓ | | E₁ |
| 522 | AlkLEᵥᵢᵢEᵢᵥ | E_{iib}EᵥᵢEₓ | | E₁ |
| 523 | AlkLEᵥᵢᵢ | E_{iib}EᵥᵢEₓ | | E₁ |
| 524 | AlkLEᵥᵢᵢEᵢ | E_{iib}EᵥᵢEₓ | | E₁ |
| 525 | AlkLEᵥᵢᵢEᵢᵢ | E_{iib}EᵥᵢEₓ | | E₁ |
| 526 | AlkLEᵥᵢᵢEᵢᵢE_{iib} | E_{iib}EᵥᵢEₓ | | E₁ |
| 527 | AlkLEᵥᵢᵢEᵢᵢᵢ | E_{iib}EᵥᵢEₓ | | E₁ |
| 528 | AlkLEᵥᵢᵢEᵢᵥ | E_{iib}EᵥᵢEₓ | | E₁ |
| 529 | AlkLEᵥᵢᵢ | E_{iib}EᵥᵢEₓ | Eₐ | E₁ |
| 530 | AlkLEᵥᵢᵢEᵢ | E_{iib}EᵥᵢEₓ | Eₐ | E₁ |
| 531 | AlkLEᵥᵢᵢEᵢᵢ | E_{iib}EᵥᵢEₓ | Eₐ | E₁ |
| 532 | AlkLEᵥᵢᵢEᵢᵢE_{iib} | E_{iib}EᵥᵢEₓ | Eₐ | E₁ |
| 533 | AlkLEᵥᵢᵢEᵢᵢᵢ | E_{iib}EᵥᵢEₓ | Eₐ | E₁ |
| 534 | AlkLEᵥᵢᵢEᵢᵥ | E_{iib}EᵥᵢEₓ | Eₐ | E₁ |
| 535 | AlkLEᵥᵢᵢ | E_{iib}EᵥᵢEₓ | E_{b} | E₁ |
| 536 | AlkLEᵥᵢᵢEᵢ | E_{iib}EᵥᵢEₓ | E_{b} | E₁ |
| 537 | AlkLEᵥᵢᵢEᵢᵢ | E_{iib}EᵥᵢEₓ | E_{b} | E₁ |
| 538 | AlkLEᵥᵢᵢEᵢᵢE_{iib} | E_{iib}EᵥᵢEₓ | E_{b} | E₁ |
| 539 | AlkLEᵥᵢᵢEᵢᵢᵢ | E_{iib}EᵥᵢEₓ | E_{b} | E₁ |
| 540 | AlkLEᵥᵢᵢEᵢᵥ | E_{iib}EᵥᵢEₓ | E_{b} | E₁ |
| 541 | AlkLEᵥᵢᵢ | E_{iib}EᵥᵢEₓ | E_{d} | E₁ |
| 542 | AlkLEᵥᵢᵢEᵢ | E_{iib}EᵥᵢEₓ | E_{d} | E₁ |
| 543 | AlkLEᵥᵢᵢEᵢᵢ | E_{iib}EᵥᵢEₓ | E_{d} | E₁ |
| 544 | AlkLEᵥᵢᵢEᵢᵢE_{iib} | E_{iib}EᵥᵢEₓ | E_{d} | E₁ |
| 545 | AlkLEᵥᵢᵢEᵢᵢᵢ | E_{iib}EᵥᵢEₓ | E_{d} | E₁ |
| 546 | AlkLEᵥᵢᵢEᵢᵥ | E_{iib}EᵥᵢEₓ | E_{d} | E₁ |
| 547 | AlkLEᵥᵢᵢ | E_{iib}EᵥᵢEₓ | Eₑ | E₁ |
| 548 | AlkLEᵥᵢᵢEᵢ | E_{iib}EᵥᵢEₓ | Eₑ | E₁ |
| 549 | AlkLEᵥᵢᵢEᵢᵢ | E_{iib}EᵥᵢEₓ | Eₑ | E₁ |
| 550 | AlkLEᵥᵢᵢEᵢᵢE_{iib} | E_{iib}EᵥᵢEₓ | Eₑ | E₁ |
| 551 | AlkLEᵥᵢᵢEᵢᵢᵢ | E_{iib}EᵥᵢEₓ | Eₑ | E₁ |
| 552 | AlkLEᵥᵢᵢEᵢᵥ | E_{iib}EᵥᵢEₓ | Eₑ | E₁ |
| 553 | AlkLEᵥᵢᵢ | E_{iib}EᵥᵢEₓ | E_{f} | E₁ |
| 554 | AlkLEᵥᵢᵢEᵢ | E_{iib}EᵥᵢEₓ | E_{f} | E₁ |
| 555 | AlkLEᵥᵢᵢEᵢᵢ | E_{iib}EᵥᵢEₓ | E_{f} | E₁ |
| 556 | AlkLEᵥᵢᵢEᵢᵢE_{iib} | E_{iib}EᵥᵢEₓ | E_{f} | E₁ |
| 557 | AlkLEᵥᵢᵢEᵢᵢᵢ | E_{iib}EᵥᵢEₓ | E_{f} | E₁ |
| 558 | AlkLEᵥᵢᵢEᵢᵥ | E_{iib}EᵥᵢEₓ | E_{f} | E₁ |
| 559 | AlkLEᵥᵢᵢ | E_{iib}EᵥᵢEₓ | | E₁ |
| 560 | AlkLEᵥᵢᵢEᵢ | E_{iib}EᵥᵢEₓ | | E₁ |
| 561 | AlkLEᵥᵢᵢEᵢᵢ | E_{iib}EᵥᵢEₓ | | E₁ |
| 562 | AlkLEᵥᵢᵢEᵢᵢE_{iib} | E_{iib}EᵥᵢEₓ | | E₁ |
| 563 | AlkLEᵥᵢᵢEᵢᵢᵢ | E_{iib}EᵥᵢEₓ | | E₁ |
| 564 | AlkLEᵥᵢᵢEᵢᵥ | E_{iib}EᵥᵢEₓ | | E₁ |
| 565 | AlkLEₓᵢᵢᵢEᵥᵢᵢ | Eᵥᵢᵢᵢ | | E₁ |
| 566 | AlkLEₓᵢᵢᵢEᵥᵢᵢEᵢ | Eᵥᵢᵢᵢ | | E₁ |
| 567 | AlkLEₓᵢᵢᵢEᵥᵢᵢEᵢᵢ | Eᵥᵢᵢᵢ | | E₁ |
| 568 | AlkLEₓᵢᵢᵢEᵥᵢᵢEᵢᵢE_{iib} | Eᵥᵢᵢᵢ | | E₁ |
| 569 | AlkLEₓᵢᵢᵢEᵥᵢᵢEᵢᵢᵢ | Eᵥᵢᵢᵢ | | E₁ |
| 570 | AlkLEₓᵢᵢᵢEᵥᵢᵢEᵢᵥ | Eᵥᵢᵢᵢ | | E₁ |
| 571 | AlkLEₓᵢᵢᵢEᵥᵢᵢ | Eᵥᵢᵢᵢ | Eₐ | E₁ |
| 572 | AlkLEₓᵢᵢᵢEᵥᵢᵢEᵢ | Eᵥᵢᵢᵢ | Eₐ | E₁ |
| 573 | AlkLEₓᵢᵢᵢEᵥᵢᵢEᵢᵢ | Eᵥᵢᵢᵢ | Eₐ | E₁ |
| 574 | AlkLEₓᵢᵢᵢEᵥᵢᵢEᵢᵢE_{iib} | Eᵥᵢᵢᵢ | Eₐ | E₁ |
| 575 | AlkLEₓᵢᵢᵢEᵥᵢᵢEᵢᵢᵢ | Eᵥᵢᵢᵢ | Eₐ | E₁ |
| 576 | AlkLEₓᵢᵢᵢEᵥᵢᵢEᵢᵥ | Eᵥᵢᵢᵢ | Eₐ | E₁ |
| 577 | AlkLEₓᵢᵢᵢEᵥᵢᵢ | Eᵥᵢᵢᵢ | E_{b} | E₁ |
| 578 | AlkLEₓᵢᵢᵢEᵥᵢᵢEᵢ | Eᵥᵢᵢᵢ | E_{b} | E₁ |
| 579 | AlkLEₓᵢᵢᵢEᵥᵢᵢEᵢᵢ | Eᵥᵢᵢᵢ | E_{b} | E₁ |
| 580 | AlkLEₓᵢᵢᵢEᵥᵢᵢEᵢᵢE_{iib} | Eᵥᵢᵢᵢ | E_{b} | E₁ |
| 581 | AlkLEₓᵢᵢᵢEᵥᵢᵢEᵢᵢᵢ | Eᵥᵢᵢᵢ | E_{b} | E₁ |
| 582 | AlkLEₓᵢᵢᵢEᵥᵢᵢEᵢᵥ | Eᵥᵢᵢᵢ | E_{b} | E₁ |
| 583 | AlkLEₓᵢᵢᵢEᵥᵢᵢ | Eᵥᵢᵢᵢ | E_{d} | E₁ |
| 584 | AlkLEₓᵢᵢᵢEᵥᵢᵢEᵢ | Eᵥᵢᵢᵢ | E_{d} | E₁ |
| 585 | AlkLEₓᵢᵢᵢEᵥᵢᵢEᵢᵢ | Eᵥᵢᵢᵢ | E_{d} | E₁ |
| 586 | AlkLEₓᵢᵢᵢEᵥᵢᵢEᵢᵢE_{iib} | Eᵥᵢᵢᵢ | E_{d} | E₁ |
| 587 | AlkLEₓᵢᵢᵢEᵥᵢᵢEᵢᵢᵢ | Eᵥᵢᵢᵢ | E_{d} | E₁ |
| 588 | AlkLEₓᵢᵢᵢEᵥᵢᵢEᵢᵥ | Eᵥᵢᵢᵢ | E_{d} | E₁ |
| 589 | AlkLEₓᵢᵢᵢEᵥᵢᵢ | Eᵥᵢᵢᵢ | Eₑ | E₁ |
| 590 | AlkLEₓᵢᵢᵢEᵥᵢᵢEᵢ | Eᵥᵢᵢᵢ | Eₑ | E₁ |
| 591 | AlkLEₓᵢᵢᵢEᵥᵢᵢEᵢᵢ | Eᵥᵢᵢᵢ | Eₑ | E₁ |
| 592 | AlkLEₓᵢᵢᵢEᵥᵢᵢEᵢᵢE_{iib} | Eᵥᵢᵢᵢ | Eₑ | E₁ |
| 593 | AlkLEₓᵢᵢᵢEᵥᵢᵢEᵢᵢᵢ | Eᵥᵢᵢᵢ | Eₑ | E₁ |
| 594 | AlkLEₓᵢᵢᵢEᵥᵢᵢEᵢᵥ | Eᵥᵢᵢᵢ | Eₑ | E₁ |
| 595 | AlkLEₓᵢᵢᵢEᵥᵢᵢ | Eᵥᵢᵢᵢ | E_{f} | E₁ |
| 596 | AlkLEₓᵢᵢᵢEᵥᵢᵢEᵢ | Eᵥᵢᵢᵢ | E_{f} | E₁ |
| 597 | AlkLEₓᵢᵢᵢEᵥᵢᵢEᵢᵢ | Eᵥᵢᵢᵢ | E_{f} | E₁ |
| 598 | AlkLEₓᵢᵢᵢEᵥᵢᵢEᵢᵢE_{iib} | Eᵥᵢᵢᵢ | E_{f} | E₁ |
| 599 | AlkLEₓᵢᵢᵢEᵥᵢᵢEᵢᵢᵢ | Eᵥᵢᵢᵢ | E_{f} | E₁ |
| 600 | AlkLEₓᵢᵢᵢEᵥᵢᵢEᵢᵥ | Eᵥᵢᵢᵢ | E_{f} | E₁ |
| 601 | AlkLEₓᵢᵢᵢEᵥᵢᵢ | Eᵢₓ | | E₁ |
| 602 | AlkLEₓᵢᵢᵢEᵥᵢᵢEᵢ | Eᵢₓ | | E₁ |
| 603 | AlkLEₓᵢᵢᵢEᵥᵢᵢEᵢᵢ | Eᵢₓ | | E₁ |
| 604 | AlkLEₓᵢᵢᵢEᵥᵢᵢEᵢᵢE_{iib} | Eᵢₓ | | E₁ |
| 605 | AlkLEₓᵢᵢᵢEᵥᵢᵢEᵢᵢᵢ | Eᵢₓ | | E₁ |
| 606 | AlkLEₓᵢᵢᵢEᵥᵢᵢEᵢᵥ | Eᵢₓ | | E₁ |
| 607 | AlkLEₓᵢᵢᵢEᵥᵢᵢ | Eᵢₓ | Eₐ | E₁ |
| 608 | AlkLEₓᵢᵢᵢEᵥᵢᵢEᵢ | Eᵢₓ | Eₐ | E₁ |
| 609 | AlkLEₓᵢᵢᵢEᵥᵢᵢEᵢᵢ | Eᵢₓ | Eₐ | E₁ |
| 610 | AlkLEₓᵢᵢᵢEᵥᵢᵢEᵢᵢE_{iib} | Eᵢₓ | Eₐ | E₁ |
| 611 | AlkLEₓᵢᵢᵢEᵥᵢᵢEᵢᵢᵢ | Eᵢₓ | Eₐ | E₁ |
| 612 | AlkLEₓᵢᵢᵢEᵥᵢᵢEᵢᵥ | Eᵢₓ | Eₐ | E₁ |
| 613 | AlkLEₓᵢᵢᵢEᵥᵢᵢ | Eᵢₓ | E_{b} | E₁ |
| 614 | AlkLEₓᵢᵢᵢEᵥᵢᵢEᵢ | Eᵢₓ | E_{b} | E₁ |
| 615 | AlkLEₓᵢᵢᵢEᵥᵢᵢEᵢᵢ | Eᵢₓ | E_{b} | E₁ |
| 616 | AlkLEₓᵢᵢᵢEᵥᵢᵢEᵢᵢE_{iib} | Eᵢₓ | E_{b} | E₁ |
| 617 | AlkLEₓᵢᵢᵢEᵥᵢᵢEᵢᵢᵢ | Eᵢₓ | E_{b} | E₁ |
| 618 | AlkLEₓᵢᵢᵢEᵥᵢᵢEᵢᵥ | Eᵢₓ | E_{b} | E₁ |
| 619 | AlkLEₓᵢᵢᵢEᵥᵢᵢ | Eᵢₓ | E_{d} | E₁ |
| 620 | AlkLEₓᵢᵢᵢEᵥᵢᵢEᵢ | Eᵢₓ | E_{d} | E₁ |
| 621 | AlkLEₓᵢᵢᵢEᵥᵢᵢEᵢᵢ | Eᵢₓ | E_{d} | E₁ |
| 622 | AlkLEₓᵢᵢᵢEᵥᵢᵢEᵢᵢE_{iib} | Eᵢₓ | E_{d} | E₁ |
| 623 | AlkLEₓᵢᵢᵢEᵥᵢᵢEᵢᵢᵢ | Eᵢₓ | E_{d} | E₁ |
| 624 | AlkLEₓᵢᵢᵢEᵥᵢᵢEᵢᵥ | Eᵢₓ | E_{d} | E₁ |
| 625 | AlkLEₓᵢᵢᵢEᵥᵢᵢ | Eᵢₓ | Eₑ | E₁ |
| 626 | AlkLEₓᵢᵢᵢEᵥᵢᵢEᵢ | Eᵢₓ | Eₑ | E₁ |
| 627 | AlkLEₓᵢᵢᵢEᵥᵢᵢEᵢᵢ | Eᵢₓ | Eₑ | E₁ |
| 628 | AlkLEₓᵢᵢᵢEᵥᵢᵢEᵢᵢE_{iib} | Eᵢₓ | Eₑ | E₁ |
| 629 | AlkLEₓᵢᵢᵢEᵥᵢᵢEᵢᵢᵢ | Eᵢₓ | Eₑ | E₁ |
| 630 | AlkLEₓᵢᵢᵢEᵥᵢᵢEᵢᵥ | Eᵢₓ | Eₑ | E₁ |
| 631 | AlkLEₓᵢᵢᵢEᵥᵢᵢ | Eᵢₓ | E_{f} | E₁ |
| 632 | AlkLEₓᵢᵢᵢEᵥᵢᵢEᵢ | Eᵢₓ | E_{f} | E₁ |
| 633 | AlkLEₓᵢᵢᵢEᵥᵢᵢEᵢᵢ | Eᵢₓ | E_{f} | E₁ |
| 634 | AlkLEₓᵢᵢᵢEᵥᵢᵢEᵢᵢE_{iib} | Eᵢₓ | E_{f} | E₁ |
| 635 | AlkLEₓᵢᵢᵢEᵥᵢᵢEᵢᵢᵢ | Eᵢₓ | E_{f} | E₁ |
| 636 | AlkLEₓᵢᵢᵢEᵥᵢᵢEᵢᵥ | Eᵢₓ | E_{f} | E₁ |
| 637 | AlkLEₓᵢᵢᵢEᵥᵢᵢ | Eₓ | | E₁ |
| 638 | AlkLEₓᵢᵢᵢEᵥᵢᵢEᵢ | Eₓ | | E₁ |
| 639 | AlkLEₓᵢᵢᵢEᵥᵢᵢEᵢᵢ | Eₓ | | E₁ |
| 640 | AlkLEₓᵢᵢᵢEᵥᵢᵢEᵢᵢE_{iib} | Eₓ | | E₁ |
| 641 | AlkLEₓᵢᵢᵢEᵥᵢᵢEᵢᵢᵢ | Eₓ | | E₁ |
| 642 | AlkLEₓᵢᵢᵢEᵥᵢᵢEᵢᵥ | Eₓ | | E₁ |
| 643 | AlkLEₓᵢᵢᵢEᵥᵢᵢ | Eₓ | Eₐ | E₁ |
| 644 | AlkLEₓᵢᵢᵢEᵥᵢᵢEᵢ | Eₓ | Eₐ | E₁ |
| 645 | AlkLEₓᵢᵢᵢEᵥᵢᵢEᵢᵢ | Eₓ | Eₐ | E₁ |
| 646 | AlkLEₓᵢᵢᵢEᵥᵢᵢEᵢᵢE_{iib} | Eₓ | Eₐ | E₁ |
| 647 | AlkLEₓᵢᵢᵢEᵥᵢᵢEᵢᵢᵢ | Eₓ | Eₐ | E₁ |
| 648 | AlkLEₓᵢᵢᵢEᵥᵢᵢEᵢᵥ | Eₓ | Eₐ | E₁ |
| 649 | AlkLEₓᵢᵢᵢEᵥᵢᵢ | Eₓ | E_{b} | E₁ |
| 650 | AlkLEₓᵢᵢᵢEᵥᵢᵢEᵢ | Eₓ | E_{b} | E₁ |
| 651 | AlkLEₓᵢᵢᵢEᵥᵢᵢEᵢᵢ | Eₓ | E_{b} | E₁ |
| 652 | AlkLEₓᵢᵢᵢEᵥᵢᵢEᵢᵢE_{iib} | Eₓ | E_{b} | E₁ |
| 653 | AlkLEₓᵢᵢᵢEᵥᵢᵢEᵢᵢᵢ | Eₓ | E_{b} | E₁ |
| 654 | AlkLEₓᵢᵢᵢEᵥᵢᵢEᵢᵥ | Eₓ | E_{b} | E₁ |
| 655 | AlkLEₓᵢᵢᵢEᵥᵢᵢ | Eₓ | E_{d} | E₁ |
| 656 | AlkLEₓᵢᵢᵢEᵥᵢᵢEᵢ | Eₓ | E_{d} | E₁ |
| 657 | AlkLEₓᵢᵢᵢEᵥᵢᵢEᵢᵢ | Eₓ | E_{d} | E₁ |
| 658 | AlkLEₓᵢᵢᵢEᵥᵢᵢEᵢᵢE_{iib} | Eₓ | E_{d} | E₁ |
| 659 | AlkLEₓᵢᵢᵢEᵥᵢᵢEᵢᵢᵢ | Eₓ | E_{d} | E₁ |
| 660 | AlkLEₓᵢᵢᵢEᵥᵢᵢEᵢᵥ | Eₓ | E_{d} | E₁ |
| 661 | AlkLEₓᵢᵢᵢEᵥᵢᵢ | Eₓ | Eₑ | E₁ |
| 662 | AlkLEₓᵢᵢᵢEᵥᵢᵢEᵢ | Eₓ | Eₑ | E₁ |
| 663 | AlkLEₓᵢᵢᵢEᵥᵢᵢEᵢᵢ | Eₓ | Eₑ | E₁ |
| 664 | AlkLEₓᵢᵢᵢEᵥᵢᵢEᵢᵢE_{iib} | Eₓ | Eₑ | E₁ |
| 665 | AlkLEₓᵢᵢᵢEᵥᵢᵢEᵢᵢᵢ | Eₓ | Eₑ | E₁ |
| 666 | AlkLEₓᵢᵢᵢEᵥᵢᵢEᵢᵥ | Eₓ | Eₑ | E₁ |
| 667 | AlkLEₓᵢᵢᵢEᵥᵢᵢ | Eₓ | E_{f} | E₁ |
| 668 | AlkLEₓᵢᵢᵢEᵥᵢᵢEᵢ | Eₓ | E_{f} | E₁ |
| 669 | AlkLEₓᵢᵢᵢEᵥᵢᵢEᵢᵢ | Eₓ | E_{f} | E₁ |
| 670 | AlkLEₓᵢᵢᵢEᵥᵢᵢEᵢᵢE_{iib} | Eₓ | E_{f} | E₁ |
| 671 | AlkLEₓᵢᵢᵢEᵥᵢᵢEᵢᵢᵢ | Eₓ | E_{f} | E₁ |
| 672 | AlkLEₓᵢᵢᵢEᵥᵢᵢEᵢᵥ | Eₓ | E_{f} | E₁ |
| 673 | AlkLEₓᵢᵢᵢEᵥᵢᵢ | EᵥᵢEᵥᵢᵢᵢ | | E₁ |
| 674 | AlkLEₓᵢᵢᵢEᵥᵢᵢEᵢ | EᵥᵢEᵥᵢᵢᵢ | | E₁ |
| 675 | AlkLEₓᵢᵢᵢEᵥᵢᵢEᵢᵢ | EᵥᵢEᵥᵢᵢᵢ | | E₁ |
| 676 | AlkLEₓᵢᵢᵢEᵥᵢᵢEᵢᵢE_{iib} | EᵥᵢEᵥᵢᵢᵢ | | E₁ |
| 677 | AlkLEₓᵢᵢᵢEᵥᵢᵢEᵢᵢᵢ | EᵥᵢEᵥᵢᵢᵢ | | E₁ |
| 678 | AlkLEₓᵢᵢᵢEᵥᵢᵢEᵢᵥ | EᵥᵢEᵥᵢᵢᵢ | | E₁ |
| 679 | AlkLEₓᵢᵢᵢEᵥᵢᵢ | EᵥᵢEᵥᵢᵢᵢ | Eₐ | E₁ |
| 680 | AlkLEₓᵢᵢᵢEᵥᵢᵢEᵢ | EᵥᵢEᵥᵢᵢᵢ | Eₐ | E₁ |
| 681 | AlkLEₓᵢᵢᵢEᵥᵢᵢEᵢᵢ | EᵥᵢEᵥᵢᵢᵢ | Eₐ | E₁ |
| 682 | AlkLEₓᵢᵢᵢEᵥᵢᵢEᵢᵢE_{iib} | EᵥᵢEᵥᵢᵢᵢ | Eₐ | E₁ |
| 683 | AlkLEₓᵢᵢᵢEᵥᵢᵢEᵢᵢᵢ | EᵥᵢEᵥᵢᵢᵢ | Eₐ | E₁ |
| 684 | AlkLEₓᵢᵢᵢEᵥᵢᵢEᵢᵥ | EᵥᵢEᵥᵢᵢᵢ | Eₐ | E₁ |
| 685 | AlkLEₓᵢᵢᵢEᵥᵢᵢ | EᵥᵢEᵥᵢᵢᵢ | E_{b} | E₁ |
| 686 | AlkLEₓᵢᵢᵢEᵥᵢᵢEᵢ | EᵥᵢEᵥᵢᵢᵢ | E_{b} | E₁ |
| 687 | AlkLEₓᵢᵢᵢEᵥᵢᵢEᵢᵢ | EᵥᵢEᵥᵢᵢᵢ | E_{b} | E₁ |
| 688 | AlkLEₓᵢᵢᵢEᵥᵢᵢEᵢᵢE_{iib} | EᵥᵢEᵥᵢᵢᵢ | E_{b} | E₁ |
| 689 | AlkLEₓᵢᵢᵢEᵥᵢᵢEᵢᵢᵢ | EᵥᵢEᵥᵢᵢᵢ | E_{b} | E₁ |
| 690 | AlkLEₓᵢᵢᵢEᵥᵢᵢEᵢᵥ | EᵥᵢEᵥᵢᵢᵢ | E_{b} | E₁ |
| 691 | AlkLEₓᵢᵢᵢEᵥᵢᵢ | EᵥᵢEᵥᵢᵢᵢ | E_{d} | E₁ |
| 692 | AlkLEₓᵢᵢᵢEᵥᵢᵢEᵢ | EᵥᵢEᵥᵢᵢᵢ | E_{d} | E₁ |
| 693 | AlkLEₓᵢᵢᵢEᵥᵢᵢEᵢᵢ | EᵥᵢEᵥᵢᵢᵢ | E_{d} | E₁ |
| 694 | AlkLEₓᵢᵢᵢEᵥᵢᵢEᵢᵢE_{iib} | EᵥᵢEᵥᵢᵢᵢ | E_{d} | E₁ |
| 695 | AlkLEₓᵢᵢᵢEᵥᵢᵢEᵢᵢᵢ | EᵥᵢEᵥᵢᵢᵢ | E_{d} | E₁ |
| 696 | AlkLEₓᵢᵢᵢEᵥᵢᵢEᵢᵥ | EᵥᵢEᵥᵢᵢᵢ | E_{d} | E₁ |
| 697 | AlkLEₓᵢᵢᵢEᵥᵢᵢ | EᵥᵢEᵥᵢᵢᵢ | Eₑ | E₁ |
| 698 | AlkLEₓᵢᵢᵢEᵥᵢᵢEᵢ | EᵥᵢEᵥᵢᵢᵢ | Eₑ | E₁ |
| 699 | AlkLEₓᵢᵢᵢEᵥᵢᵢEᵢᵢ | EᵥᵢEᵥᵢᵢᵢ | Eₑ | E₁ |
| 700 | AlkLEₓᵢᵢᵢEᵥᵢᵢEᵢᵢE_{iib} | EᵥᵢEᵥᵢᵢᵢ | Eₑ | E₁ |
| 701 | AlkLEₓᵢᵢᵢEᵥᵢᵢEᵢᵢᵢ | EᵥᵢEᵥᵢᵢᵢ | Eₑ | E₁ |
| 702 | AlkLEₓᵢᵢᵢEᵥᵢᵢEᵢᵥ | EᵥᵢEᵥᵢᵢᵢ | Eₑ | E₁ |
| 703 | AlkLEₓᵢᵢᵢEᵥᵢᵢ | EᵥᵢEᵥᵢᵢᵢ | E_{f} | E₁ |
| 704 | AlkLEₓᵢᵢᵢEᵥᵢᵢEᵢ | EᵥᵢEᵥᵢᵢᵢ | E_{f} | E₁ |
| 705 | AlkLEₓᵢᵢᵢEᵥᵢᵢEᵢᵢ | EᵥᵢEᵥᵢᵢᵢ | E_{f} | E₁ |
| 706 | AlkLEₓᵢᵢᵢEᵥᵢᵢEᵢᵢE_{iib} | EᵥᵢEᵥᵢᵢᵢ | E_{f} | E₁ |
| 707 | AlkLEₓᵢᵢᵢEᵥᵢᵢEᵢᵢᵢ | EᵥᵢEᵥᵢᵢᵢ | E_{f} | E₁ |
| 708 | AlkLEₓᵢᵢᵢEᵥᵢᵢEᵢᵥ | EᵥᵢEᵥᵢᵢᵢ | E_{f} | E₁ |
| 709 | AlkLEₓᵢᵢᵢEᵥᵢᵢ | E_{iib}EᵥᵢEₓ | | E₁ |
| 710 | AlkLEₓᵢᵢᵢEᵥᵢᵢEᵢ | E_{iib}EᵥᵢEₓ | | E₁ |
| 711 | AlkLEₓᵢᵢᵢEᵥᵢᵢEᵢᵢ | E_{iib}EᵥᵢEₓ | | E₁ |
| 712 | AlkLEₓᵢᵢᵢEᵥᵢᵢEᵢᵢE_{iib} | E_{iib}EᵥᵢEₓ | | E₁ |
| 713 | AlkLEₓᵢᵢᵢEᵥᵢᵢEᵢᵢᵢ | E_{iib}EᵥᵢEₓ | | E₁ |
| 714 | AlkLEₓᵢᵢᵢEᵥᵢᵢEᵢᵥ | E_{iib}EᵥᵢEₓ | | E₁ |
| 715 | AlkLEₓᵢᵢᵢEᵥᵢᵢ | E_{iib}EᵥᵢEₓ | Eₐ | E₁ |
| 716 | AlkLEₓᵢᵢᵢEᵥᵢᵢEᵢ | E_{iib}EᵥᵢEₓ | Eₐ | E₁ |
| 717 | AlkLEₓᵢᵢᵢEᵥᵢᵢEᵢᵢ | E_{iib}EᵥᵢEₓ | Eₐ | E₁ |
| 718 | AlkLEₓᵢᵢᵢEᵥᵢᵢEᵢᵢE_{iib} | E_{iib}EᵥᵢEₓ | Eₐ | E₁ |
| 719 | AlkLEₓᵢᵢᵢEᵥᵢᵢEᵢᵢᵢ | E_{iib}EᵥᵢEₓ | Eₐ | E₁ |
| 720 | AlkLEₓᵢᵢᵢEᵥᵢᵢEᵢᵥ | E_{iib}EᵥᵢEₓ | Eₐ | E₁ |
| 721 | AlkLEₓᵢᵢᵢEᵥᵢᵢ | E_{iib}EᵥᵢEₓ | E_{b} | E₁ |
| 722 | AlkLEₓᵢᵢᵢEᵥᵢᵢEᵢ | E_{iib}EᵥᵢEₓ | E_{b} | E₁ |
| 723 | AlkLEₓᵢᵢᵢEᵥᵢᵢEᵢᵢ | E_{iib}EᵥᵢEₓ | E_{b} | E₁ |
| 724 | AlkLEₓᵢᵢᵢEᵥᵢᵢEᵢᵢE_{iib} | E_{iib}EᵥᵢEₓ | E_{b} | E₁ |
| 725 | AlkLEₓᵢᵢᵢEᵥᵢᵢEᵢᵢᵢ | E_{iib}EᵥᵢEₓ | E_{b} | E₁ |
| 726 | AlkLEₓᵢᵢᵢEᵥᵢᵢEᵢᵥ | E_{iib}EᵥᵢEₓ | E_{b} | E₁ |
| 727 | AlkLEₓᵢᵢᵢEᵥᵢᵢ | E_{iib}EᵥᵢEₓ | E_{d} | E₁ |
| 728 | AlkLEₓᵢᵢᵢEᵥᵢᵢEᵢ | E_{iib}EᵥᵢEₓ | E_{d} | E₁ |
| 729 | AlkLEₓᵢᵢᵢEᵥᵢᵢEᵢᵢ | E_{iib}EᵥᵢEₓ | E_{d} | E₁ |
| 730 | AlkLEₓᵢᵢᵢEᵥᵢᵢEᵢᵢE_{iib} | E_{iib}EᵥᵢEₓ | E_{d} | E₁ |
| 731 | AlkLEₓᵢᵢᵢEᵥᵢᵢEᵢᵢᵢ | E_{iib}EᵥᵢEₓ | E_{d} | E₁ |
| 732 | AlkLEₓᵢᵢᵢEᵥᵢᵢEᵢᵥ | E_{iib}EᵥᵢEₓ | E_{d} | E₁ |
| 733 | AlkLEₓᵢᵢᵢEᵥᵢᵢ | E_{iib}EᵥᵢEₓ | Eₑ | E₁ |
| 734 | AlkLEₓᵢᵢᵢEᵥᵢᵢEᵢ | E_{iib}EᵥᵢEₓ | Eₑ | E₁ |
| 735 | AlkLEₓᵢᵢᵢEᵥᵢᵢEᵢᵢ | E_{iib}EᵥᵢEₓ | Eₑ | E₁ |
| 736 | AlkLEₓᵢᵢᵢEᵥᵢᵢEᵢᵢE_{iib} | E_{iib}EᵥᵢEₓ | Eₑ | E₁ |
| 737 | AlkLEₓᵢᵢᵢEᵥᵢᵢEᵢᵢᵢ | E_{iib}EᵥᵢEₓ | Eₑ | E₁ |
| 738 | AlkLEₓᵢᵢᵢEᵥᵢᵢEᵢᵥ | E_{iib}EᵥᵢEₓ | Eₑ | E₁ |
| 739 | AlkLEₓᵢᵢᵢEᵥᵢᵢ | E_{iib}EᵥᵢEₓ | E_{f} | E₁ |
| 740 | AlkLEₓᵢᵢᵢEᵥᵢᵢEᵢ | E_{iib}EᵥᵢEₓ | E_{f} | E₁ |
| 741 | AlkLEₓᵢᵢᵢEᵥᵢᵢEᵢᵢ | E_{iib}EᵥᵢEₓ | E_{f} | E₁ |
| 742 | AlkLEₓᵢᵢᵢEᵥᵢᵢEᵢᵢE_{iib} | E_{iib}EᵥᵢEₓ | E_{f} | E₁ |
| 743 | AlkLEₓᵢᵢᵢEᵥᵢᵢEᵢᵢᵢ | E_{iib}EᵥᵢEₓ | E_{f} | E₁ |
| 744 | AlkLEₓᵢᵢᵢEᵥᵢᵢEᵢᵥ | E_{iib}EᵥᵢEₓ | E_{f} | E₁ |

[0203] Especially preferred alternative embodiments of microorganisms according to the invention are explained hereinafter:

[0204] For preparing carboxylic acids with 6 to 18 carbon atoms, in particular fatty acids, microorganisms according to the invention which are particularly preferably suitable are characterized in that the first genetic modification is an activity which is increased in comparison with the enzymatic activity of the wild type of the microorganism of at least one of the enzymes Eᵢ which comprises sequences selected from among: AAC49180.1 (encoded by SEQ ID No.: 10), AAC49269.1 (encoded by SEQ ID No.: 8), Q39513.1 (encoded by SEQ ID No.: 9), AAC49001.1 (encoded by SEQ ID No.: 37), AEM72521.1 (encoded by SEQ ID No.: 35)

and
proteins having a polypeptide sequence in which up to 60%, preferably up to 25%, particularly preferably up to 15%, in particular up to 10, 9, 8, 7, 6, 5, 4, 3, 2, 1% of the amino acid residues are modified in comparison with the abovementioned reference sequences by deletion, insertion, substitution or a combination thereof and which still have at least 50%, preferably 65%, especially preferably 80%, in particular more than 90%, of the activity of the protein with the corresponding abovementioned reference sequence, where 100% activity of the reference protein is understood as meaning the increase of the activity of the cells used as biocatalyst, that is to say the amount of substance reacted per unit time, based on the cell weight used (units per gram of cell dry weight [U/g CDW]), compared with the activity of the biocatalyst without the presence of the reference protein, where activity in this context and in the context of the determination of the activity of the enzyme Eᵢ is generally understood in particular as meaning the hydrolysis of dodecanoyl-ACP thioester,
and the alkL gene product is selected from among those that are encoded by the alkL gene of Pseudomonas putida GPo1, which is rendered by SEQ ID No. 1, and proteins with polypeptide sequence SEQ ID No. 2, SEQ ID No. 31, SEQ ID No. 32 or SEQ ID No. 33 or with a polypeptide sequence in which up to 60%, preferably up to 25%, particularly preferably up to 15%, in particular up to 10, 9, 8, 7, 6, 5, 4, 3, 2, 1% of the amino acid residues are modified in comparison with SEQ ID No. 2, SEQ ID No. 31, SEQ ID No. 32 or SEQ ID No. 33 by deletion, insertion, substitution or a combination thereof and which still have at least 50%, preferably 65%, particularly preferably 80%, in particular more than 90%, of the activity of the protein with the respective reference sequence SEQ ID No. 2, SEQ ID No. 31, SEQ ID No. 32 or SEQ ID No. 33, where 100% activity of the reference protein is understood as meaning the increase of the activity of the cells used as biocatalyst, that is to say the amount of substance reacted per unit time, based on the cell weight used (units per gram of cell dry weight [U/g CDW]), compared with the activity of the biocatalyst without the presence of the reference protein, more particularly in a system as is described in the exemplary embodiments, in which glucose is reacted to form palmitoleic acid in an E. coli cell.

[0205] In this context it can be advantageous when the microorganism contains a fifth genetic modification which has an activity which is reduced compared with the enzymatic activity of the wild type of the microorganism of at least one of the enzymes E_{b}, where E_{b} is selected from among enzymes which comprise sequences selected from YP_{—}488518.1 (encoded by SEQ ID No. 14, formerly AP_{—}000876.1) and

proteins having a polypeptide sequence in which up to 60%, preferably up to 25%, especially preferably up to 15%, in particular up to 10, 9, 8, 7, 6, 5, 4, 3, 2, 1% of the amino acid residues are modified in comparison with the abovementioned reference sequences by deletion, insertion, substitution or a combination thereof and which still have at least 50%, preferably 65%, especially preferably 80%, in particular more than 90%, of the activity of the protein with the corresponding abovementioned reference sequence, where 100% of the activity of the reference protein is understood as meaning the increase of the activity of the cells used as biocatalyst, that is to say the amount of substance reacted per unit time, based on the cell weight used (units per gram of cell dry weight [U/g CDW]), compared with the activity of the biocatalyst without the presence of the reference protein, where activity in this context and in the context of the determination of the activity of the enzyme E_{b} is generally understood in particular as meaning the oxidation of dodecanoyl-CoA thioester to 2-dodecenoyl-CoA thioester.

[0206] For producing esters of carboxylic acids having 6 to 18 carbon atoms in the carboxylic acid portion in which the alcohol component is derived from methanol or ethanol, especially preferably, microorganisms according to the invention are suitable which are characterized in that the first genetic modification is an activity which is increased in comparison with the enzymatic activity of the wild type of the microorganism of at least one of the enzymes Eᵢ, which comprises sequences selected from among: AAC49180.1 (encoded by SEQ ID No.: 10), AAC49269.1 (encoded by SEQ ID No.: 8), Q39513.1 (encoded by SEQ ID No.: 9), AAC49001.1 (encoded by SEQ ID No.: 37), AEM72521.1 (encoded by SEQ ID No.: 35)

and
proteins having a polypeptide sequence in which up to 60%, preferably up to 25%, especially preferably up to 15%, in particular up to 10, 9, 8, 7, 6, 5, 4, 3, 2, 1% of the amino acid residues are modified in comparison with the abovementioned reference sequences by deletion, insertion, substitution or a combination thereof and which still have at least 50%, preferably 65%, especially preferably 80%, in particular more than 90%, of the activity of the protein with the corresponding abovementioned reference sequence, where 100% activity of the reference protein is understood as meaning the increase of the activity of the cells used as biocatalyst, that is to say the amount of substance reacted per unit time, based on the cell weight used (units per gram of cell dry weight [U/g CDW]), compared with the activity of the biocatalyst without the presence of the reference protein, where activity in this context and in the context of the determination of the activity of the enzyme Eᵢ is generally understood in particular as meaning the hydrolysis of dodecanoyl-ACP thioester,
and
the alkL gene product is selected from those which are encoded by the alkL gene of Pseudomonas putida GPo1, which is rendered by SEQ ID No. 1, and proteins with a polypeptide sequence in which up to 60%, preferably up to 25%, especially preferably up to 15%, in particular up to 10, 9, 8, 7, 6, 5, 4, 3, 2, 1% of the amino acid residues are modified in comparison with SEQ ID No. 2 by deletion, insertion, substitution or a combination thereof and which still have at least 50%, preferably 65%, especially preferably 80%, in particular more than 90% of the activity of the protein with the reference sequence SEQ ID No. 2, where 100% activity of the reference protein is understood as meaning the increase of the activity of the cells used as biocatalyst, that is to say the amount of substance reacted per unit time, based on the cell weight used (units per gram of cell dry weight [U/g CDW]), compared with the activity of the biocatalyst without the presence of the reference protein, namely in a system as described in the exemplary embodiments in which glucose is reacted to form palmitoleic acid in an E. coli cell,
and
in that it has a third genetic modification which has an activity of the enzymes Eᵥ and Eᵥᵢ, which is increased in comparison with the enzymatic activity of the wild type of the microorganism,
where Eᵥ is selected from among YP_{—}694462.1 (encoded by SEQ ID No. 67) and YP_{—}045555.1 (encoded by SEQ ID No. 19), and
proteins with a polypeptide sequence in which up to 60%, preferably up to 25%, especially preferably up to 15%, in particular up to 10, 9, 8, 7, 6, 5, 4, 3, 2, 1% of the amino acid residues are modified in comparison with the abovementioned reference sequence by deletion, insertion, substitution or a combination thereof and which still have at least 50%, preferably 65%, especially preferably 80%, in particular more than 90%, of the activity of the protein with the corresponding abovementioned reference sequence, where 100% activity of the reference protein is understood as meaning the increase of the activity of the cells used as biocatalyst, that is to say the amount of substance reacted per unit time, based on the cell weight used (units per gram of cell dry weight [U/g CDW]), compared with the activity of the biocatalyst without the presence of the reference protein, where activity in this context and in the context of the determination of the activity of the enzyme Eᵥ is generally understood in particular as meaning the conversion of dodecanoyl-CoA thioester with methanol to form dodecanoyl methyl ester,
and Eᵥᵢ is selected from among YP_{—}001724804.1 (encoded by SEQ ID No.: 18), and proteins with a polypeptide sequence in which up to 60%, preferably up to 25%, especially preferably up to 15%, in particular up to 10, 9, 8, 7, 6, 5, 4, 3, 2, 1% of the amino acid residues are modified in comparison with the abovementioned reference sequence by deletion, insertion, substitution or a combination thereof and which still have at least 50%, preferably 65%, especially preferably 80%, in particular more than 90%, of the activity of the protein with the corresponding abovementioned reference sequence, where 100% activity of the reference protein is understood as meaning the increase of the activity of the cells used as biocatalyst, that is to say the amount of substance reacted per unit time, based on the cell weight used (units per gram of cell dry weight [U/g CDW]), compared with the activity of the biocatalyst without the presence of the reference protein, where activity in this context and in the context of the determination of the activity of the enzyme Eᵥᵢ is generally understood in particular as meaning the synthesis of dodecanoyl-CoA thioester.

[0207] In this context, it can also be advantageous if the microorganism contains a fifth genetic modification which has an activity which is reduced compared with the enzymatic activity of the wild type of the microorganism of at least one of the enzymes E_{b}, where E_{b} is selected from enzymes which comprises sequences that are selected from among YP_{—}488518.1 (encoded by SEQ ID No. 14, formerly AP_{—}000876.1), and

proteins with a polypeptide sequence in which up to 60%, preferably up to 25%, especially preferably up to 15%, in particular up to 10, 9, 8, 7, 6, 5, 4, 3, 2, 1% of the amino acid residues are modified in comparison with the abovementioned reference sequences by deletion, insertion, substitution or a combination thereof and which still have at least 50%, preferably 65%, especially preferably 80%, in particular more than 90%, of the activity of the protein with the corresponding abovementioned reference sequence, where 100% activity of the reference protein is understood as meaning the increase of the activity of the cells used as biocatalyst, that is to say the amount of substance reacted per unit time, based on the cell weight used (units per gram of cell dry weight [U/g CDW]), compared with the activity of the biocatalyst without the presence of the reference protein, where activity in this context and in the context of the determination of the activity of the enzyme E_{b} is generally understood in particular as meaning the oxidation of dodecanoyl-CoA thioester to form 2-dodecenoyl-CoA thioester.

[0208] In an alternative embodiment for producing esters of carboxylic acid with 6 to 18 carbon atoms in the carboxylic acid portion, in which the alcohol component is derived from methanol or ethanol, microorganisms according to the invention suitable which are particularly preferably are characterized in that the first genetic modification is an activity which is increased in comparison with the enzymatic activity of the wild type of at least one of the enzymes Eᵢ which comprises sequences that are selected from among: AAC49269.1 (encoded by SEQ ID No.: 8), Q39513.1 (encoded by SEQ ID No.: 9), AAC49001.1 (encoded by SEQ ID No.: 37), AEM72521.1 (encoded by SEQ ID No.: 35)

and
proteins with a polypeptide sequence in which up to 60%, preferably up to 25%, especially preferably up to 15%, in particular up to 10, 9, 8, 7, 6, 5, 4, 3, 2, 1% of the amino acid residues are modified in comparison with the abovementioned reference sequences by deletion, insertion, substitution, or a combination thereof and which still have at least 50%, preferably 65%, especially preferably 80%, in particular more than 90%, of the activity of the protein with the corresponding abovementioned reference sequence, where 100% activity of the reference protein is understood as meaning the increase of the activity of the cells used as biocatalyst, that is to say the amount of substance reacted per unit time, based on the cell weight used (units per gram of cell dry weight [U/g CDW]), compared with the activity of the biocatalyst without the presence of the reference protein, where activity in this context and in the context of the determination of the activity of the enzyme Eᵢ is generally understood in particular as meaning the hydrolysis of dodecanoyl-ACP thioester,
and
the alkL gene product is selected from those which are encoded by the alkL gene of Pseudomonas putida GPo1, which is shown by SEQ ID No. 1, and proteins with a polypeptide sequence in which up to 60%, preferably up to 25%, especially preferably up to 15%, in particular up to 10, 9, 8, 7, 6, 5, 4, 3, 2, 1% of the amino acid residues are modified in comparison with SEQ ID No. 2 by deletion, insertion, substitution or a combination thereof and which still have at least 50%, preferably 65%, especially preferably 80%, in particular more than 90%, of the activity of the protein with the reference sequence SEQ ID No. 2, where 100% activity of the reference protein is understood as meaning the increase of the activity of the cells used as biocatalyst, that is to say the amount of substance reacted per unit time, based on the cell weight used (units per gram of cell dry weight [U/g CDW]), compared with the activity of the biocatalyst without the presence of the reference protein, more precisely in a system as described in the exemplary embodiments in which glucose is reacted to form palmitoleic acid in an E. coli cell,
and
in that it has a third genetic modification which has an activity which is increased in comparison with the enzymatic activity of the wild type of the microorganism of the enzyme Eᵥₐ,
where Eᵥₐ is selected from among YP_{—}888622.1 (encoded by SEQ ID No. 114) and proteins with a polypeptide sequence in which up to 60%, preferably up to 25%, especially preferably up to 15%, in particular up to 10, 9, 8, 7, 6, 5, 4, 3, 2, 1% of the amino acid residues are modified in comparison with the abovementioned reference sequence by deletion, insertion, substitution or a combination thereof and which still have at least 50%, preferably 65%, especially preferably 80%, in particular more than 90%, of the activity of the protein with the corresponding abovementioned reference sequence, where 100% activity of the reference protein is understood as meaning the increase of the activity of the cells used as biocatalyst, that is to say the amount of substance reacted per unit time, based on the cell weight used (units per gram of cell dry weight [U/g CDW]), compared with the activity of the biocatalyst without the presence of the reference protein, where activity in this context and in the context of the determination of the activity of the enzyme Eᵥₐ is generally understood in particular as meaning the conversion of lauric acid and S-adenosylmethionine to form lauric acid methyl ester and S-adenosylhomocysteine.

[0209] In this context it can also be advantageous if the microorganism contains a fifth genetic modification which has an activity which is reduced compared with the enzymatic activity of the wild type of the microorganism of at least one of the enzymes E_{b}, where E_{b} is selected from enzymes which have sequences that are selected from among YP_{—}488518.1 (encoded by SEQ ID No. 14, formerly AP_{—}000876.1), and

proteins with a polypeptide sequence in which up to 60%, preferably up to 25%, especially preferably up to 15%, in particular up to 10, 9, 8, 7, 6, 5, 4, 3, 2, 1% of the amino acid residues are modified in comparison with the abovementioned reference sequences by deletion, insertion, substitution or a combination thereof and which still have at least 50%, preferably 65%, especially preferably 80%, in particular more than 90%, of the activity of the protein with the corresponding abovementioned reference sequence, where 100% activity of the reference protein is understood as meaning the increase of the activity of the cells used as biocatalyst, that is to say the amount of substance reacted per unit time, based on the cell weight used (units per gram of cell dry weight [U/g CDW]), compared with the activity of the biocatalyst without the presence of the reference protein, where activity in this context and in the context of the determination of the activity of the enzyme E_{b} is generally understood in particular as meaning the oxidation of dodecanoyl-CoA thioester to give 2-dodecenoyl-CoA thioester.

[0210] For production of monohydric alcohols with 6 to 18 carbon atoms, microorganisms according to the invention which are especially preferably suitable are characterized in that the first genetic modification is an activity that is increased in comparison with the enzymatic activity of the wild type of the microorganism of at least one of the enzymes Eᵢ which comprises sequences selected from among: AAC49269.1 (encoded by SEQ ID No: 8), AEM72521.1 (encoded by SEQ ID No: 35)

and
proteins with a polypeptide sequence in which up to 60%, preferably up to 25%, especially preferably up to 15%, in particular up to 10, 9, 8, 7, 6, 5, 4, 3, 2, 1% of the amino acid residues are modified in comparison with the abovementioned reference sequences by deletion, insertion, substitution, or a combination thereof and which still have at least 50%, preferably 65%, especially preferably 80%, in particular more than 90%, of the activity of the protein with the corresponding abovementioned reference sequence, where 100% activity of the reference protein is understood as meaning the increase of the activity of the cells used as biocatalyst, that is to say the amount of substance reacted per unit time, based on the cell weight used (units per gram of cell dry weight [U/g CDW]), compared with the activity of the biocatalyst without the presence of the reference protein, where activity in this context and in the context of the determination of the activity of the enzyme Eᵢ is generally understood in particular as meaning the hydrolysis of dodecanoyl-ACP thioester,
and
the alkL gene product is selected from among those encoded by the alkL gene of Pseudomonas putida GPo1, which is shown by SEQ ID No. 1, and proteins with a polypeptide sequence in which up to 60%, preferably up to 25%, especially preferably up to 15%, in particular up to 10, 9, 8, 7, 6, 5, 4, 3, 2, 1% of the amino acid residues are modified in comparison with SEQ ID No. 2 by deletion, insertion, substitution or a combination thereof and which still have at least 50%, preferably 65%, especially preferably 80%, in particular more than 90%, of the activity of the protein with the reference sequence SEQ ID No. 2, where 100% activity of the reference protein is understood as meaning the increase of the activity of the cells used as biocatalyst, that is to say the amount of substance reacted per unit time, based on the cell weight used (units per gram of cell dry weight [U/g CDW]), compared with the activity of the biocatalyst without the presence of the reference protein, namely in a system as described in the exemplary embodiments in which glucose is reacted to form palmitoleic acid in an E. coli cell, and in that it has a third genetic modification which has an activity which is increased in comparison with the enzymatic activity of the wild type of the microorganism of the enzyme Eᵥᵢ,
where Eᵥᵢ is selected from among YP_{—}001724804.1 (encoded by SEQ ID No: 18)
and
proteins with a polypeptide sequence in which up to 60%, preferably up to 25%, especially preferably up to 15%, in particular up to 10, 9, 8, 7, 6, 5, 4, 3, 2, 1% of the amino acid residues are modified in comparison with the abovementioned reference sequence by deletion, insertion, substitution or a combination thereof and which still have at least 50%, preferably 65%, especially preferably 80%, in particular more than 90%, of the activity of the protein with the corresponding abovementioned reference sequence, where 100% activity of the reference protein is understood as meaning the increase of the activity of the cells used as biocatalyst, that is to say the amount of substance reacted per unit time, based on the cell weight used (units per gram of cell dry weight [U/g CDW]), compared with the activity of the biocatalyst without the presence of the reference protein, where activity in this context and in the context of the determination of the activity of the enzyme Eᵥᵢ is generally understood in particular as meaning the synthesis of dodecanoyl-CoA thioester, and
in that it has a fourth genetic modification which has an activity which is increased in comparison with the enzymatic activity of the wild type of the microorganism of the enzyme Eₓ, where Eₓ is selected from among BAB85476.1 (encoded by SEQ ID No. 77), YP_{—}047869.1 (encoded by SEQ ID No. 79 or 81), YP_{—}959486.1 (encoded by SEQ ID No. 83), YP_{—}959769.1 (encoded by SEQ ID No. 139), B9TSP7.1 (encoded by SEQ ID No. 141), and
proteins with a polypeptide sequence in which up to 60%, preferably up to 25%, especially preferably up to 15%, in particular up to 10, 9, 8, 7, 6, 5, 4, 3, 2, 1% of the amino acid residues are modified in comparison with the abovementioned reference sequences by deletion, insertion, substitution or a combination thereof and which still have at least 50%, preferably 65%, especially preferably 80%, in particular more than 90%, of the activity of the protein with the corresponding abovementioned reference sequence, where 100% activity of the reference protein is understood as meaning the increase of the activity of the cells used as biocatalyst, that is to say the amount of substance reacted per unit time, based on the cell weight used (units per gram of cell dry weight [U/g CDW]), in comparison with the activity of the biocatalyst without the presence of the reference protein, where activity in this context and in the context of the determination of the activity of the enzyme Eₓ is generally understood in particular as meaning the synthesis of lauryl alcohol and NAD(P)⁺ from lauryl-ACP, NAD(P)H and H⁺. In this context it can also be advantageous if the microorganism contains a fifth genetic modification which has an activity which is reduced compared with the enzymatic activity of the wild type of the microorganism of at least one of the enzymes E_{b}, wherein E_{b} is selected from enzymes that have sequences which are selected from among YP_{—}488518.1 (encoded by SEQ ID No. 14, formerly AP_{—}000876.1), and
proteins with a polypeptide sequence in which up to 60%, preferably up to 25%, especially preferably up to 15%, in particular up to 10, 9, 8, 7, 6, 5, 4, 3, 2, 1% of the amino acid residues are modified in comparison with the abovementioned reference sequences by deletion, insertion, substitution, or a combination thereof and which still have at least 50%, preferably 65%, especially preferably 80%, in particular more than 90%, of the activity of the protein with the corresponding abovementioned reference sequence, where 100% activity of the reference protein is understood as meaning the increase of the activity of the cells used as biocatalyst, that is to say the amount of substance reacted per unit time, based on the cell weight used (units per gram of cell dry weight [U/g CDW]), compared with the activity of the biocatalyst without the presence of the reference protein, where activity in this context and in the context of the determination of the activity of the enzyme E_{b} is generally understood in particular as meaning the oxidation of dodecanoyl-CoA thioester to form 2-dodecenoyl-CoA thioester.

[0211] For producing monohydric alcohols and aldehydes with 6 to 18 carbon atoms, microorganisms according to the invention which are especially preferably suitable are characterized in that the first genetic modification is an activity that is increased in comparison with the enzymatic activity of the wild type of the microorganism of at least one of the enzymes Eᵢ which comprises sequences selected from among: AAC49269.1 (encoded by SEQ ID No: 8), Q39513.1 (encoded by SEQ ID No: 9), AAC49001.1 (encoded by SEQ ID No: 37), AEM72521.1 (encoded by SEQ ID No: 35)

and
proteins with a polypeptide sequence in which up to 60%, preferably up to 25%, especially preferably up to 15%, in particular up to 10, 9, 8, 7, 6, 5, 4, 3, 2, 1% of the amino acid residues are modified in comparison with the abovementioned reference sequences by deletion, insertion, substitution or a combination thereof and which still have at least 50%, preferably 65%, especially preferably 80%, in particular more than 90%, of the activity of the protein with the corresponding abovementioned reference sequence, where 100% activity of the reference protein is understood as meaning the increase of the activity of the cells used as biocatalyst, that is to say the amount of substance reacted per unit time, based on the cell weight used (units per gram of cell dry weight [U/g CDW]), compared with the activity of the biocatalyst without the presence of the reference protein, where activity in this context and in the context of the determination of the activity of the enzyme Eᵢ is generally understood in particular as meaning the hydrolysis of dodecanoyl-ACP thioester,
and
the alkL gene product is selected from those encoded by the alkL gene of Pseudomonas putida GPo1, which is shown by SEQ ID No. 1, and proteins with a polypeptide sequence in which up to 60%, preferably up to 25%, especially preferably up to 15%, in particular up to 10, 9, 8, 7, 6, 5, 4, 3, 2, 1% of the amino acid residues are modified in comparison with SEQ ID No. 2 by deletion, insertion, substitution or a combination thereof and which still have at least 50%, preferably 65%, especially preferably 80%, in particular more than 90%, of the activity of the protein with the reference sequence SEQ ID No. 2, where 100% activity of the reference protein is understood as meaning the increase of the activity of the cells used as biocatalyst, that is to say the amount of substance reacted per unit time, based on the cell weight used (units per gram of cell dry weight [U/g CDW]), compared with the activity of the biocatalyst without the presence of the reference protein, namely in a system as described in the exemplary embodiments, in which glucose is reacted to form palmitoleic acid in an E. coli cell,
and
in that it has a fourth genetic modification which has an activity which is increased in comparison with the enzymatic activity of the wild type of the microorganism of the enzyme Eᵢₓ, where Eᵢₓ is selected from among YP_{—}887275.1 (encoded by SEQ ID No. 117), ABI83656.1 (encoded by SEQ ID No. 122), and
proteins with a polypeptide sequence in which up to 60%, preferably up to 25%, especially preferably up to 15%, in particular up to 10, 9, 8, 7, 6, 5, 4, 3, 2, 1% of the amino acid residues are modified in comparison with the abovementioned reference sequences by deletion, insertion, substitution or a combination thereof and which still have at least 50%, preferably 65%, especially preferably 80%, in particular more than 90%, of the activity of the protein with the corresponding abovementioned reference sequence, where 100% activity of the reference protein is understood as meaning the increase of the activity of the cells used as biocatalyst, that is to say the amount of substance reacted per unit time, based on the cell weight used (units per gram of cell dry weight [U/g CDW]), compared with the activity of the biocatalyst without the presence of the reference protein, where activity in this context and in the context of the determination of the activity of the enzyme Eᵢₓ is generally understood in particular as meaning the synthesis of lauryl aldehyde, NADP, AMP and 2 Pᵢ from lauric acid, ATP, NADPH and H⁺.

[0212] In this context it can also be advantageous if the microorganism contains a fifth genetic modification which has an activity which is reduced in comparison with the enzymatic activity of the wild type of the microorganism of at least one of the enzymes E_{b}, where E_{b} is selected from enzymes which comprise sequences selected from among YP_{—}488518.1 (encoded by SEQ ID No. 14, formerly AP_{—}000876.1), and

proteins with a polypeptide sequence in which up to 60%, preferably up to 25%, especially preferably up to 15%, in particular up to 10, 9, 8, 7, 6, 5, 4, 3, 2, 1% of the amino acid residues are modified in comparison with the abovementioned reference sequences by deletion, insertion, substitution or a combination thereof and which still have at least 50%, preferably 65%, especially preferably 80%, in particular more than 90%, of the activity of the protein with the corresponding abovementioned reference sequence, where 100% activity of the reference protein is understood as meaning the increase of the activity of the cells used as biocatalyst, that is to say the amount of substance reacted per unit time, based on the cell weight used (units per gram of cell dry weight [U/g CDW]), compared with the activity of the biocatalyst without the presence of the reference protein, where activity in this context and in the context of the determination of the activity of the enzyme E_{b} is generally understood in particular as meaning the oxidation of dodecanoyl-CoA thioester to form 2-dodecenoyl-CoA thioester.

[0213] For production of alkylamines with 8 to 16 carbon atoms, microorganisms according to the invention which are especially preferably suitable are characterized in that the first genetic modification is an activity that is increased in comparison with the enzymatic activity of the wild type of the microorganism of at least one of the enzymes Eᵢ, which comprises sequences that are selected from among: AAC49269.1 (encoded by SEQ ID No: 8), Q39513.1 (encoded by SEQ ID No: 9), AAC49001.1 (encoded by SEQ ID No: 37),

and
proteins with a polypeptide sequence in which up to 60%, preferably up to 25%, especially preferably up to 15%, in particular up to 10, 9, 8, 7, 6, 5, 4, 3, 2, 1% of the amino acid residues are modified in comparison with the abovementioned reference sequences by deletion, insertion, substitution or a combination thereof and which still have at least 50%, preferably 65%, especially preferably 80%, in particular more than 90%, of the activity of the protein with the corresponding abovementioned reference sequence, where 100% activity of the reference protein is understood as meaning the increase of the activity of the cells used as biocatalyst, that is to say the amount of substance reacted per unit time, based on the cell weight used (units per gram of cell dry weight [U/g CDW]), in comparison with the activity of the biocatalyst without the presence of the reference protein, where activity in this context and in the context of the determination of the activity of the enzyme Eᵢ is generally understood in particular as meaning the hydrolysis of dodecanoyl-ACP thioester,
and
the alkL gene product is selected from those encoded by the alkL gene of Pseudomonas putida GPo1, which is shown by SEQ ID No. 1, and proteins with a polypeptide sequence in which up to 60%, preferably up to 25%, especially preferably up to 15%, in particular up to 10, 9, 8, 7, 6, 5, 4, 3, 2, 1% of the amino acid residues are modified in comparison with SEQ ID No. 2 by deletion, insertion, substitution or a combination thereof and which still have at least 50%, preferably 65%, especially preferably 80%, in particular more than 90%, of the activity of the protein with the reference sequence SEQ ID No. 2, where 100% activity of the reference protein is understood as meaning the increase of the activity of the cells used as biocatalyst, that is to say the amount of substance reacted per unit time, based on the cell weight used (units per gram of cell dry weight [U/g CDW]), compared with the activity of the biocatalyst without the presence of the reference protein, more precisely in a system as described in the exemplary embodiments in which glucose is reacted to form palmitoleic acid in an E. coli cell,
and
it has a fourth genetic modification which has an activity which is increased in comparison with the enzymatic activity of the wild type of the microorganism of at least one enzyme Eₓᵢᵢᵢ, where this is selected from among NP_{—}901695.1 (encoded by SEQ ID No. 132) and
proteins having a polypeptide sequence in which up to 60%, preferably up to 25%, especially preferably up to 15%, in particular up to 10, 9, 8, 7, 6, 5, 4, 3, 2, 1% of the amino acid residues are modified in comparison with the abovementioned reference sequence by deletion, insertion, substitution or a combination thereof and which still have at least 50%, preferably 65%, especially preferably 80%, in particular more than 90%, of the activity of the protein with the corresponding abovementioned reference sequence, where 100% activity of the reference protein is understood as meaning the increase of the activity of the cells used as biocatalyst, that is to say the amount of substance reacted per unit time, based on the cell weight used (units per gram of cell dry weight [U/g CDW]), compared with the activity of the biocatalyst without the presence of the reference protein, where activity in this context and in the context of the determination of the activity of the enzyme Eₓᵢᵢᵢ is generally understood in particular as meaning the reaction of ω-oxolauric acid and/or ω-oxolauric acid methyl ester to form ω-aminolauric acid and/or ω-aminolauric acid methyl ester.

[0214] It can also be advantageous in this context if the microorganism contains a fifth genetic modification which has an activity which is reduced in comparison with the enzymatic activity of the wild type of the microorganism of at least one of the enzymes E_{b}, where E_{b} is selected from enzymes which have sequences selected from among YP_{—}488518.1 (encoded by SEQ ID No. 14, formerly AP_{—}000876.1), and

proteins with a polypeptide sequence in which up to 60%, preferably up to 25%, especially preferably up to 15%, in particular up to 10, 9, 8, 7, 6, 5, 4, 3, 2, 1% of the amino acid residues are modified in comparison with the abovementioned reference sequences by deletion, insertion, substitution or a combination thereof and which still have at least 50%, preferably 65%, especially preferably 80%, in particular more than 90%, of the activity of the protein with the corresponding abovementioned reference sequence, where 100% activity of the reference protein is understood as meaning the increase of the activity of the cells used as biocatalyst, that is to say the amount of substance reacted per unit time, based on the cell weight used (units per gram of cell dry weight [U/g CDW]), compared with the activity of the biocatalyst without the presence of the reference protein, where activity in this context and in the context of the determination of the activity of the enzyme E_{b} is generally understood in particular as meaning the oxidation of dodecanoyl-CoA thioester to form 2-dodecenoyl-CoA thioester.

[0215] For production of alkenes with 6 to 18 carbon atoms, microorganisms according to the invention which are particularly preferably suitable are characterized in that the first genetic modification is an activity which is increased in comparison with the enzymatic activity of the wild type of the microorganism of at least one of the enzymes Eᵢ, which comprises sequences selected from among: AAC49269.1 (encoded by SEQ ID No: 8), Q39513.1 (encoded by SEQ ID No: 9), AAC49001.1 (encoded by SEQ ID No: 37), AEM72521.1 (encoded by SEQ ID No: 35)

and
proteins with a polypeptide sequence in which up to 60%, preferably up to 25%, especially preferably up to 15%, in particular up to 10, 9, 8, 7, 6, 5, 4, 3, 2, 1% of the amino acid residues are modified in comparison with the abovementioned reference sequences by deletion, insertion, substitution or a combination thereof and which still have at least 50%, preferably 65%, especially preferably 80%, in particular more than 90%, of the activity of the protein with the corresponding abovementioned reference sequence, where 100% activity of the reference protein is understood as meaning the increase of the activity of the cells used as biocatalyst, that is to say the amount of substance reacted per unit time, based on the cell weight used (units per gram of cell dry weight [U/g CDW]), compared with the activity of the biocatalyst without the presence of the reference protein, where activity in this context and in the context of the determination of the activity of the enzyme Eᵢ is generally understood in particular as meaning the hydrolysis of dodecanoyl-ACP thioester,
and
the alkL gene product is selected from among those encoded by the alkL gene of Pseudomonas putida GPo1, which is shown by SEQ ID No. 1, and proteins with a polypeptide sequence in which up to 60%, preferably up to 25%, especially preferably up to 15%, in particular up to 10, 9, 8, 7, 6, 5, 4, 3, 2, 1% of the amino acid residues are modified in comparison with SEQ ID No. 2, by deletion, insertion, substitution or a combination thereof and which still have at least 50%, preferably 65%, especially preferably 80%, in particular more than 90%, of the activity of the protein with the reference sequence SEQ ID No. 2, where 100% activity of the reference protein is understood as meaning the increase of the activity of the cells used as biocatalyst, that is to say the amount of substance reacted per unit time, based on the cell weight used (units per gram of cell dry weight [U/g CDW]), compared with the activity of the biocatalyst without the presence of the reference protein, namely in a system as is described in the exemplary embodiments, in which glucose is reacted to form palmitoleic acid in an E. coli cell,
and
it has a fourth genetic modification which has an activity which is increased in comparison with the enzymatic activity of the wild type of the microorganism of at least one enzyme Eₓᵢ, where this is selected from among ADW41779.1 (encoded by SEQ ID No. 168) and
proteins with a polypeptide sequence in which up to 60%, preferably up to 25%, especially preferably up to 15%, in particular up to 10, 9, 8, 7, 6, 5, 4, 3, 2, 1% of the amino acid residues are modified in comparison with the abovementioned reference sequence by deletion, insertion, substitution or a combination thereof and which still have at least 50%, preferably 65%, especially preferably 80%, in particular more than 90%, of the activity of the protein with the corresponding abovementioned reference sequence, where 100% activity of the reference protein is understood as meaning the increase of the activity of the cells used as biocatalyst, that is to say the amount of substance reacted per unit time, based on the cell weight used (units per gram of cell dry weight [U/g CDW]), compared with the activity of the biocatalyst without the presence of the reference protein, where activity in this context and in the context of the determination of the activity of the enzyme Eₓᵢᵢᵢ is generally understood in particular as meaning the reaction of sodium palmitate with hydrogen peroxide to form pentadecene, CO₂ and water.

[0216] In this context it can also be advantageous if the microorganism contains a fifth genetic modification which has an activity which is reduced in comparison with the enzymatic activity of the wild type of the microorganism of at least one of the enzymes E_{b}, where E_{b} is selected from among enzymes which comprise sequences selected from among YP_{—}488518.1 (encoded by SEQ ID No. 14),

and
proteins having a polypeptide sequence in which up to 60%, preferably up to 25%, especially preferably up to 15%, in particular up to 10, 9, 8, 7, 6, 5, 4, 3, 2, 1% of the amino acid residues are modified in comparison with the abovementioned reference sequences by deletion, insertion, substitution or a combination thereof and which still have at least 50%, preferably 65%, especially preferably 80%, in particular more than 90%, of the activity of the protein with the corresponding abovementioned reference sequence, where 100% activity of the reference protein is understood as meaning the increase of the activity of the cells used as biocatalyst, that is to say the amount of substance reacted per unit time, based on the cell weight used (units per gram of cell dry weight [U/g CDW]), compared with the activity of the biocatalyst without the presence of the reference protein, where activity in this context and in the context of the determination of the activity of the enzyme E_{b} is generally understood in particular as meaning the oxidation of dodecanoyl-CoA thioester to 2-dodecenoyl-CoA thioester.

### Use of the Microorganisms According to the Invention

[0217] A further subject matter of the present invention relates to the use of the abovementioned microorganisms for the production of organic substances, in particular of fatty acids, fatty acid esters, alkan-1-als, alkan-1-ols and alkan-1-amines, alken-1-als, alken-1-ols, alken-1-amines, alkanes and alkenes, in particular 1-alkenes, which may optionally include a further double bond.

[0218] Organic substances and microorganisms which have been emphasized as being preferred in the context of the microorganisms according to the invention are also preferred in the context of the use according to the invention.

[0219] The organisms according to the invention which are preferably used for specific organic substances have already been emphasized in the context of the microorganisms according to the invention.

Process for the Production of an Organic Substance from a Simple Carbon Source

[0220] A further subject matter of the present invention relates to a process for the production of an organic substance, in particular of fatty acids, fatty acid esters, alkan-1-als, alkan-1-ols and alkan-1-amines, alken-1-als, alken-1-ols, alken-1-amines, alkanes and alkenes, in particular 1-alkenes, which may optionally include a further double bond, from a simple carbon source comprising the process steps

I) bringing a microorganism according to the invention into contact with a medium comprising the simple carbon source,
II) culturing the microorganism under conditions which make it possible for the microorganism to form the organic substance from the simple carbon source, and
III) if appropriate, isolation of the organic substance formed.

[0221] In the process according to the invention, the microorganisms according to the invention may, for the purpose of producing the organic substance, be brought into contact with the nutrient medium and thus cultured continuously or discontinuously in the batch method or in the fed-batch method or in the repeated fed-batch method. Also feasible is a semicontinuous process as described in GB-A-1009370. A summary of known culture methods is described in the textbook by Chmiel (“Bioprozesstechnik 1. Einfuhrung in die Bioverfahrenstechnik”, Gustav Fischer Verlag, Stuttgart, 1991) or in the textbook by Storhas (“Bioreaktoren and periphere Einrichtungen”, Vieweg Verlag, Braunschweig/Wiesbaden, 1994).

[0222] The culture medium to be used must suitably satisfy the requirements of the respective strains. Descriptions of culture media of various microorganisms are contained in the handbook “Manual of Methods for General Bacteriology” of the American Society for Bacteriology (Washington D.C., USA, 1981).

[0223] In the process according to the invention, it is preferred to employ preferred microorganisms according to the invention.

[0224] The simple carbon source which is employed in the process according to the invention are those mentioned above as being preferred.

[0225] Nitrogen sources which can be employed are organic nitrogenous compounds such as peptones, yeast extract, meat extract, malt extract, cornsteep liquor, soyabean meal and urea or inorganic compounds such as ammonium sulphate, ammonium chloride, ammonium phosphate, ammonium carbonate and ammonium nitrate, ammonia, ammonium hydroxide or ammonia water. The nitrogen sources may be employed individually or as a mixture. Phosphorus sources which can be used are phosphoric acid, potassium dihydrogen phosphate or dipotassium hydrogen phosphate or the corresponding sodium-containing salts. The culture medium must furthermore contain salts of metals such as, for example, magnesium sulphate or iron sulphate, which are necessary for growth. Finally, essential growth factors such as amino acids and vitamins may be employed in addition to the abovementioned substances. Moreover, suitable precursors may be added to the culture medium. The feed substances mentioned may be added to the culture as a single batch or may be fed in a suitable manner during culturing. The pH of the culture is controlled by employing basic compounds such as sodium hydroxide, potassium hydroxide, ammonia or ammonia water, or acidic compounds such as phosphoric acid or sulphuric acid in a suitable manner. Foaming may be controlled by using antifoams such as, for example, fatty acid polyglycol esters. To maintain stability of plasmids, suitable selective substances such as antibiotics, for example, may be added to the medium. Oxygen or oxygen-containing gas mixtures such as, for example, air are introduced into the culture so as to maintain aerobic conditions.

[0226] According to one embodiment of the process according to the invention, said process is carried out in a two-phase system comprising

A) an aqueous phase and
B) an organic phase,
where the organic substance is formed by the microorganism in process step II) in the aqueous phase and the organic substance formed accumulates in the organic phase. In this manner, it is possible for the organic substance formed to be extracted in situ.

[0227] Preferred organic substances which are produced by the process according to the invention are the substances mentioned hereinabove as being preferred, in particular the fatty acids and fatty acid derivatives.

[0228] In the examples mentioned hereinbelow, the present invention will be described with the aid of examples without it being intended to limit the invention, whose scope of use is revealed in the entire description and the claims, to the embodiments mentioned in the examples.

[0229] The organisms according to the invention which are preferably employed for specific organic substances in preferred processes according to the invention have already been emphasized in the context of the microorganisms according to the invention.

### EXAMPLES

### Example 1

### Preparation of an E. coli Expression Vector for the Overexpression of the alkL Gene from P. putida GPo1

[0230] To prepare an E. coli expression vector for the overexpression of the Pseudomonas putida alkL gene (SEQ ID No.: 01), this gene was prepared synthetically and then amplified like the P_{lacuv5} promoter (SEQ ID No.: 34) from a pJ294 derivative, with the introduction of homologous regions for recombination cloning. At the same time, a cleavage site was introduced upstream of the promoter and a cleavage site was introduced downstream of the alkL stop codon via the oligonucleotides used.

[0231] The following oligonucleotides were employed for the amplification of the alkL gene and the P_{lacuv5} promoter from the respective pJ294 derivatives as the template:

Promoter region:
(SEQ ID No.: 03)

| | |
|---|---|
| fw-Prom + H1: | 5′-ACC ACA GCC AGG ATC CTT CAA TAT |
| | TAT TGA AGC-3′ |

(SEQ ID No.: 04)

| | |
|---|---|
| rv-Prom: | 5′-ATG CCA CTC TCC TTG-3′ |

(SEQ ID No.: 05)

| | |
|---|---|
| fw-alkL + H2: | 5′-CAA GGA GAG TGG CAT GTG AGT TTT |
| | TCT AAT TAT -3′ |

(SEQ ID No.: 06)

| | |
|---|---|
| rv-alkL + H3: | 5′-TTA CCA GAC TCG AGG GTA CCT TAG |
| | AAA ACA TAT GAC-3′ |

[0232] The following parameters were employed for the PCR: 1×: initial denaturation, 98° C., 0:30 min; 35×: denaturation, 98° C., 0:30 min, annealing, 50.5° C., 0:45 min; elongation, 72° C., 0:15 min; 1×: terminal elongation, 72° C., 5 min. The Phusion™ High-Fidelity Master Mix from New England Biolabs (Frankfurt) was used for the amplification, following the manufacturer's recommendations. Thereafter, in each case 100 μl of the PCR reactions were separated on a 2% agarose gel. The procedure of the PCR, the agarose gel electrophoresis, the ethidium bromide staining of the DNA and the determination of the PCR fragment sizes were carried out in a manner known to the skilled worker.

[0233] In both cases, PCR fragments of the expected size were successfully amplified. The size was 654 base pairs for the promoter region and 728 base pairs for the alkL construct.

[0234] To isolate the DNA from an agarose gel, the target DNA was excised from the gel using a surgical blade and purified using the “Quick Gel Extraction Kit” from Qiagen (Hilden). This was done following the manufacturer's instructions. In the next step, the PCR products together with the BamHI-KpnI-cut pCDFDuet-1 (71340-3, Merck, Darmstadt) underwent recombination by means of in vitro cloning using the “In-Fusion Advantage PCR Cloning Kit” from Clontech (Saint-Germain-en-Laye), giving rise to the resulting vector. The use corresponded to the manufacturer's instructions.

[0235] pCDFDuet-1 is an E. coli vector which confers spectinomycin/streptomycin resistance to the organism and which contains a CoIDF13 replication origin. The transformation of chemically competent E. coli DH5α cells (New England Biolabs, Frankfurt) was performed in the manner known to the skilled worker.

[0236] The correctness of the plasmid was checked by restriction analysis with XbaI. The authenticity of the inserted fragments was verified by DNA sequencing. The finished E. coli expression vector was named pCDF[alkL] (SEQ ID No.:07).

### Example 2

### Preparation of Expression Vectors for the fatB2 and fatB1 Genes from Cuphea hookeriana and fatB2 from Cuphea palustris

[0237] To prepare expression vectors for the fatB2 and fatB1 genes from Cuphea hookeriana (SEQ ID No. 08 and SEQ ID No. 09, respectively) and fatB2 from Cuphea palustris (SEQ ID No. 10), these genes were codon-optimized for the expression in Escherichia coli. The genes were synthesized together with a tac promoter (SEQ ID No. 39) and, simultaneously, a cleavage site was introduced upstream of the promoter and a cleavage site was introduced downstream of the terminator. The synthesized DNA fragments P_{tac}-ChFatB2, P_{tac}-ChFatB1 and P_{tac}-CpFatB2 were digested with the restriction endonucleases BamHI and NotI and ligated into the correspondingly cut vector pJ294 (DNA 2.0 Inc.; Menlo Park, Calif., USA). The finished E. coli expression vectors were named pJ294[Ptac-ChFATB2_optEc] (SEQ ID No. 11), pJ294[Ptac-CpFATB2_optEc] (SEQ ID No. 13) and pJ294[Ptac-ChFATB1_optEc] (SEQ ID No. 12), respectively.

### Example 3

### Chromatographic Quantification of Products

[0238] Fatty acids were quantified following derivatization as fatty acid methyl esters, using gas chromatography. After the addition of 1 ml of acetone and 2 ml of water, 50 μl of heptadecanoic acid (10 g/l dissolved in ethanol) were added as internal reference substance to the samples, consisting of 2 ml of culture broth. The samples were acidified with 200 μl of acetic acid and treated with 10 ml of a 1:1 (v/v) chloroform/methanol mixture. The samples were mixed thoroughly for at least 1 min. Thereafter, the chloroform phase was removed and evaporated. The dry residue was taken up in 1 ml of 1.25 M methanolic hydrochloric acid and incubated at 50° C. overnight to esterify the fatty acids present. The reaction was stopped by addition of 5 ml of saturated sodium carbonate solution (all substances from Sigma-Aldrich, Steinheim). The fatty acid methyl esters were extracted by addition of 1 ml of n-heptane and mixing vigorously for 15 seconds. The heptane phase was measured by means of gas chromatography. To separate fatty acid methyl esters, the capillary column SP™-2560 of dimensions 100 m×0.25 mm and a film thickness of 0.2 μm (Supelco, Sigma-Aldrich, Steinheim) was employed as the stationary phase. The carrier gas employed was helium. The separation was carried out within 45 min at an injector temperature of 260° C., a detector temperature of 260° C. and a column temperature of 140° C. at the beginning, held for 5 min, and increased to 240° C. at a rate of 4° C./min and held for 15 min. The injection volume was 1 μl, the split rate was 1:20 and the flow rate of the carrier gas 1 ml/min. Detection was by means of a flame ionization detector (GC Perkin Elmer Clarus 500, Perkin Elmer, Rodgau). Heptadecanoic acid (Sigma-Aldrich, Steinheim) was used as the internal reference substance for quantifying the fatty acid methyl esters. The reference substances C8:0-Me caprylic acid methyl ester, C10:0-Me capric acid methyl ester, C12:0-Me lauric acid methyl ester, C14:0-Me myristic acid methyl ester, C16:0-Me palmitic acid methyl ester, C16:1-Me palmitoleic acid methyl ester, C18:0-Me stearic acid methyl ester, C18:1-Me oleic acid methyl ester (GLC Standard Mix GLC-20 1892-1AMP, GLC-30 1893-1AMP, GLC-50 1894-1AMP, Sigma-Aldrich, Steinheim) were used for the calibration. The lower detection limits were a concentration of 10 mg/l for all fatty acid methyl esters.

### Example 4

### Production of Fatty Acids by E. coli Strains with Deletion in the fadE Gene, which Overexpress the alkL Genes from Pseudomonas putida GPo1 in Various Modifications and fatB2 from Cuphea hookeriana

[0239] The first step was to construct an E. coli strain with deletion in the fadE gene (SEQ ID No. 14). To make the gene deletion, a plasmid which carries the DNA sequence ΔfadE (SEQ ID No. 15) was constructed. This sequence was synthesized and is composed of homologous regions 500 base pairs upstream and downstream of the fadE gene and the recognition sequence for the restriction endonuclease NotI at the 5′ and the 3′ end. The sequence ΔfadE was digested with the restriction endonuclease NotI and ligated into the analogously cut vector pKO3. The strain E. coli W3110 ΔfadE was constructed using the pKO3-ΔfadE construct (SEQ ID No. 16) using methods known to the skilled worker (see Link A J, Phillips D, Church G M. J. Bacteriol. 1997. 179(20).). The DNA sequence after the deletion is shown in SEQ ID No. 17.

[0240] To generate E. coli strains with the expression vector for the alkL gene from Pseudomonas putida GPo1 in combination with the expression vector for the fatB2 gene from Cuphea hookeriana, electrocompetent cells of E. coli W3110 ΔfadE were prepared. This was done in a manner known to the skilled worker. The cells were transformed with the plasmids pCDFDuet-1 or pCDF[alkL] in combination with pJ294[Ptac-ChFATB2_optEc] and plated onto LB plates supplemented with spectinomycin (100 μg/ml) and ampicillin (100 μg/ml). Transformants were checked for the presence of the correct plasmids by plasmid preparation and analytical restriction analysis.

[0241] The following E. coli strains were generated in this manner:
[0242] E. coli W3110 ΔfadE pCDFDuet-1/pJ294[Ptac-ChFATB2_optEc]
[0243] E. coli W3110 ΔfadE pCDF[alkL]/pJ294[Ptac-ChFATB2_optEc]

[0244] These strains were used to study their ability to produce fatty acids. The following procedure was employed:

[0245] The strains were subjected to a multi-stage aerobic culturing process. The strains to be studied were first grown from in each case one single colony in Luria-Bertani broth as described by Miller (Merck, Darmstadt) as a 5 ml preculture. The next culturing step was performed in M9 medium. The medium, composed of 38 mM disodium hydrogenphosphate dihydrate, 22 mM potassium dihydrogenphosphate, 8.6 mM sodium chloride, 37 mM ammonium chloride, 2% (w/v) glucose, 2 mM magnesium sulphate heptahydrate (all chemicals from Merck, Darmstadt) and 0.1% (v/v) trace element solution, was brought to pH 7.4 using 25% strength ammonium hydroxide solution. The added trace element solution, composed of 9.7 mM manganese(II) chloride tetrahydrate, 6.5 mM zinc sulphate heptahydrate, 2.5 mM sodium EDTA (Titriplex III), 4.9 mM boric acid, 1 mM sodium molybdate dihydrate, 32 mM calcium chloride dihydrate, 64 mM iron(II) sulphate heptahydrate and 0.9 mM copper(II) chloride dihydrate, dissolved in 37% hydrochloric acid solution (all chemicals from Merck, Darmstadt), was filter-sterilized before being added to the M9 medium. 10 ml of M9 medium together with 100 μg/ml of spectinomycin and 100 μg/ml of ampicillin were introduced into 100 ml baffled Erlenmeyer flasks and inoculated with 0.5 ml of the preculture. Culturing was done at 37° C. and 200 rpm in a shaker-incubator. After a culturing time of 8 hours, 50 ml of M9 medium supplemented with 100 μg/ml of spectinomycin and 100 μg/ml of ampicillin were introduced into a 250 ml baffled Erlenmeyer flask and inoculated with the 10 ml culture so that an optical density (600 nm) of 0.2 was obtained. Culturing was done at 30° C. and 200 rpm in a shaker-incubator. When an optical density (600 nm) of from 0.4 to 0.5 had been reached, the gene expression was induced by adding 1 mM of IPTG (time t₀). The strains were cultured for at least another 24 hours under identical conditions. During the culture period, 2 ml samples were taken, and the concentration of fatty acids with different carbon chain length was quantified analogously to Example 3. The results are shown in the table which follows.

TABLE 1
Production of fatty acids using E. coli W3110 ΔfadE, which overexpresses fatB2 from
C. hookeriana and alkL from P. putida GPo1. The data shown are the concentrations of fatty
acids with different carbon chain lengths after incubation for 29 hours.

| | C_{Caprylic acid} | C_{Capric acid} | C_{Myristic acid} | C_{Palmitic acid} | C_{Palmitoleic acid} | C_{Stearic acid} | C_{Oleic acid} |
|---|---|---|---|---|---|---|---|
| Strain | [mg/l * OD] | [mg/l * OD] | [mg/l * OD] | [mg/l * OD] | [mg/l * OD] | [mg/l * OD] | [mg/l * OD] |
| E. coli W3110 ΔfadE pCDFDuet- | 30.1 | 2.4 | 1.9 | 13.6 | 17.3 | 3.6 | 1.9 |
| 1/pJ294[Ptac-ChFATB2_optEc] | | | | | | | |
| E. coli W3110 ΔfadE | 82.6 | 10.6 | 4.1 | 23.7 | 74.0 | 9.1 | 4.1 |
| pCDF[alkL]/pJ294[Ptac- | | | | | | | |
| ChFATB2_optEc] | | | | | | | |

[0246] This demonstrated that the strains with alkL form considerably more caprylic acid, capric acid, myristic acid, palmitic acid, palmitoleic acid, stearic acid and oleic acid than the strains without alkL. This demonstrates that enhancing alkL promotes the production of fatty acids of different chain lengths and degrees of saturation from nonrelated carbon sources.

### Example 5

### Preparation of an E. coli Expression Vector for the Genes fadD from Escherichia coli and atfA from Acinetobacter sp. ADP1

[0247] To prepare the E. coli expression vector for the genes fadD (SEQ ID No.: 18) from Escherichia coli and atfA with terminator (SEQ ID No.: 19) from Acinetobacter sp. ADP1 under the control of a tac promoter, these genes were amplified by PCR from chromosomal DNA of E. coli W3110 and Acinetobacter calcoaceticus ADP1, respectively, with the introduction of homologous regions for recombination cloning. The synthetic tac promoter (SEQ ID No.: 20) was amplified with ribosome binding site from a pJ294 derivative, with introduction of homologous regions. Chromosomal DNA was prepared from E. coli W3110 and Acinetobacter calcoaceticus ADP1, respectively, by means of the DNeasy Blood & Tissue Kit (Qiagen, Hilden) following the manufacturer's instructions. The following oligonucleotides were employed in the amplification of the genes fadD from E. coli and atfA from Acinetobacter sp. ADP1 with chromosomal DNA of E. coli W3110 and Acinetobacter calcoaceticus ADP1, respectively, as the template and in the amplification of the synthetic P_{tac} promoter from a pJ294 derivative:

P_{tac}:
(SEQ ID No.: 21)

| | |
|---|---|
| 11-001_fw: | 5′-TTATGCGACTCCTGCGTTTAGGGAAAGAGCATTT |
| | G-3′ |

(SEQ ID No.: 22)

| | |
|---|---|
| Ptac-rv: | 5′-GTTAACATATGTTTTACCTCCTGTTAAACAAA-3′ |

fadD [E. coli]:
(SEQ ID No.: 23)

| | |
|---|---|
| fadD-fw: | 5′-TAAAACATATGTTAACGGCATGTATATCATTT-3′ |

(SEQ ID No.: 24)

| | |
|---|---|
| fadD-rv: | 5′-TCTCCTCAGACTTAACGCTCAGGCTTTATTGT-3′ |

atfA [Acinetobacter sp. ADP1]:
(SEQ ID No.: 25)

| | |
|---|---|
| atfA-fw: | 5′-GTTAAGTCTGAGGAGATCCACGCTATGCGCCC-3′ |

(SEQ ID No.: 26)

| | |
|---|---|
| 11-00_rv: | 5′-CAATTGAGATCTGCCACGACTGCAATGGTTCATC-3′ |

[0248] The following parameters were employed for the PCR: 1×: initial denaturation, 103° C., 3:00 min; 35×: denaturation, 98° C., 0:10 min, annealing, 65° C., 0:15 min; elongation, 72° C., 0:45 min; 1×: terminal elongation, 72° C., 10 min. The Phusion™ High-Fidelity Master Mix from New England Biolabs (Frankfurt) was used for the amplification, following the manufacturer's recommendations. Thereafter, in each case 50 μl of the PCR reactions were separated on a 1% TAE agarose gel. The procedure of the PCR, the agarose gel electrophoresis, the ethidium bromide staining of the DNA and the determination of the PCR fragment sizes were carried out in a manner known to the skilled worker.

[0249] In all cases, PCR fragments of the expected size were successfully amplified. The size was 607 bp for the P_{tac} promoter region, 1778 by for fadD and 1540 by for atfA.

[0250] To isolate the DNA from an agarose gel, the target DNA was isolated from the gel using a surgical blade and purified using the “Quick Gel Extraction Kit” from Qiagen (Hilden) following the manufacturer's instructions. The purified PCR products underwent recombination with the EcoNI/NdeI-cut vector pCDFDuet™-1 (71340-3, Merck, Darmstadt) by means of in-vitro cloning using the Geneart Seamless Cloning and Assembly Kit from Invitrogen (Darmstadt). The use corresponded to the manufacturer's instructions. pCDFDuet-1 is an E. coli vector which confers spectinomycin/streptomycin resistance to the organism and which contains a CoIDF13 replication origin. The transformation of chemically competent E. coli DH5α cells (New England Biolabs, Frankfurt) was performed in the manner known to the skilled worker. The correctness of the plasmid was checked by restriction analysis with XbaI. The authenticity of the inserted fragments was verified by DNA sequencing. The finished E. coli expression vector was named pCDF[fadD-atfA] (SEQ ID No.:27).

### Example 6

### Preparation of an E. coli Expression Vector for the Genes fadD from Escherichia coli atfA from Acinetobacter sp. ADP1 and alkL from Pseudomonas putida GPo1

[0251] To prepare an E. coli expression vector for the genes fadD from Escherichia coli, atfA from Acinetobacter sp. ADP1 and alkL from Pseudomonas putida GPo1, the plasmid pCDF[alkL] (SEQ ID No.: 07) is digested with FseI and XhoI, and the fragment which carries the alkL gene from Pseudomonas putida GPo1 under the control of the P_{lacuv5} promoter (see Example 1) is subsequently isolated.

[0252] To this end, the digested plasmid is separated on a 1% TAE agarose gel. The procedure of the restriction digestion, the agarose gel electrophoresis, the ethidium bromide staining of the DNA and the determination of the restriction fragment sizes are performed in a manner known to the skilled worker. To isolate the DNA from an agarose gel, the target DNA is isolated from the gel using a surgical blade and purified using the Quick Gel Extraktion Kit from Qiagen (Hilden) following the manufacturer's instructions.

[0253] Thereafter, the purified restriction fragment is ligated with the likewise FseI- and XhoI-cut vector fragment (7290 bp) of pCDF[fadD-atfA] (SEQ ID No.: 27). Ligation of the DNA fragment and transformation of chemically competent E. coli DH5α cells (New England Biolabs, Frankfurt) are performed in the manner known to the skilled worker.

[0254] The correctness of the plasmids produced is checked by restriction analysis with FseI and XhoI. The authenticity of the inserted fragments is verified by DNA sequencing. The finished E. coli/expression vector is named pCDF[fadD-atfA]-[alkL] (SEQ ID No.:28).

### Example 7

### Chromatographic Quantification of Products

[0255] The quantification of fatty acid esters is performed using gas chromatography. 100 μl of methyl heptadecanoate solution (5 g/l dissolved in acetone) are added to the samples, consisting of 1 ml of culture broth, and then 1.1 ml of n-heptane are added and the samples are vortexed vigorously for 15 seconds. The heptane phase is measured by means of gas chromatography. To separate fatty acid esters, the capillary column SP™-2560 of dimensions 100 m×0.25 mm and a film thickness of 0.2 μm (Supelco, Sigma-Aldrich, Steinheim) is employed as the stationary phase. The carrier gas employed is helium. The separation is carried out within 45 min at an injector temperature of 260° C., a detector temperature of 260° C. and a column temperature of 140° C. at the beginning, held for 5 min, and increased to 240° C. at a rate of 4° C./min and held for 15 min. The injection volume is 1 μl, the split rate is 1:20 and the flow rate of the carrier gas 1 ml/min. Detection is by means of a flame ionization detector (GC Perkin Elmer Glarus 500, Perkin Elmer, Rodgau). Methyl heptanoate (Sigma-Aldrich, Steinheim) is used as the internal reference substance for quantifying the fatty acid esters. The reference substances C8:0-Me caprylic acid methyl ester, C10:0-Me capric acid methyl ester, C12:0-Me lauric acid methyl ester, C14:0-Me myristic acid methyl ester, C16:0-Me palmitic acid methyl ester, C16:1-Me palmitoleic acid methyl ester, C18:0-Me stearic acid methyl ester, C18:1-Me oleic acid methyl ester (GLC Standard Mix GLC-20 1892-1AMP, GLC-30 1893-1AMP, GLC-50 1894-1AMP, Sigma-Aldrich, Steinheim), C8:0-Et caprylic acid ethyl ester, C10:0-Et capric acid ethyl ester, C12:0-Et lauric acid ethyl ester, C14:0-Et myristic acid ethyl ester, C16:0-Et palmitic acid ethyl ester, C18:0-Et stearic acid ethyl ester, C18:1-Et oleic acid ethyl ester (all from Sigma-Aldrich, Steinheim) and C16:1-Et palmitoleic acid ethyl ester (Biomol, Hamburg) are used for the calibration. The lower detection limits are a concentration of 10 mg/l for all fatty acid esters.

### Example 8

### Production of Fatty Acid Esters by E. coli Strains which have a Deletion in the fadE Gene and which Overexpress the alkL Genes from Pseudomonas putida GPo1, ChfatB1 and ChfatB2 from Cuphea hookeriana, and Cpfat2″ from Cuphea palustris, fadD from E. coli and atfA from Acinetobacter sp. ADP1

[0256] To generate E. coli strains with the expression vector for the alkL genes from Pseudomonas putida GPo1, fadD from Escherichia coli and atfA from Acinetobacter sp. ADP1 from Pseudomonas putida GPo1 in combination with the expression vector for the fatB2 gene from Cuphea hookeriana, electrocompetent cells of E. coli W3110 ΔfadE (see Example 4) are prepared. This was done in a manner known to the skilled worker. They are transformed with the plasmids pCDF[fadD-atfA] (SEQ ID No.: 27) and pCDF[fadD-atfA]-[alkL] (SEQ ID No.: 28), respectively, in combination with pJ294[Ptac-ChFATB2_optEc] (SEQ ID No. 11), pJ294[Ptac-CpFATB2_optEc] (SEQ ID No.: 13) and pJ294[Ptac-ChFATB1_optEc] (SEQ ID No.: 12), respectively, in and plated onto LB plates supplemented with spectinomycin (100 μg/ml) and ampicillin (100 μg/ml). Transformants are checked for the presence of the correct plasmids by plasmid preparation and analytical restriction analysis.

[0257] The following E. coli strains are generated in this manner:
[0258] E. coli W3110 ΔfadE pCDF[fadD-atfA]pJ294[Ptac-ChFATB2_optEc]
[0259] E. coli W3110 ΔfadE pCDF[fadD-atfA]alkl-4-pJ294[Ptac-ChFATB2_optEc]
[0260] E. coli W3110 ΔfadE pCDF[fadD-atfA]/pJ294[Ptac-CpFATB2_optEc]
[0261] E. coli W3110 ΔfadE pCDF[fadD-atfA]alkLypJ294[Ptac-CpFATB2_optEc]
[0262] E. coli W3110 ΔfadE pCDF[fadD-atfA]/pJ294[Ptac-ChFATB1_optEc]
[0263] E. coli W3110 ΔfadE pCDF[fadD-atfA]alkl-4-pJ294[Ptac-ChFATB1_optEc]

[0264] These strains are used to study their ability to produce fatty acid esters. The following procedure is employed:

The strains are subjected to a multi-stage aerobic culturing process. The strains to be studied are first grown from in each case one single colony in Luria-Bertani broth as described by Miller (Merck, Darmstadt) as a 5 ml preculture. The next culturing step is performed in M9 medium. The medium, composed of 38 mM disodium hydrogenphosphate dihydrate, 22 mM potassium dihydrogenphosphate, 8.6 mM sodium chloride, 37 mM ammonium chloride, 2% (w/v) glucose, 2 mM magnesium sulphate heptahydrate (all chemicals from Merck, Darmstadt) and 0.1% (v/v) trace element solution, is brought to pH 7.4 using 25% strength ammonium hydroxide solution. The added trace element solution, composed of 9.7 mM manganese(II) chloride tetrahydrate, 6.5 mM zinc sulphate heptahydrate, 2.5 mM sodium EDTA (Titriplex III), 4.9 mM boric acid, 1 mM sodium molybdate dihydrate, 32 mM calcium chloride dihydrate, 64 mM iron(II) sulphate heptahydrate and 0.9 mM copper(II) chloride dihydrate, dissolved in 37% hydrochloric acid solution (all chemicals from Merck, Darmstadt), is filter-sterilized before being added to the M9 medium. 10 ml of M9 medium together with 100 μg/ml of spectinomycin and 100 μg/ml of ampicillin are introduced into 100 ml baffled Erlenmeyer flasks and inoculated with 0.5 ml of the preculture. Culturing is done at 37° C. and 200 rpm in a shaker-incubator. After a culturing time of 8 hours, 50 ml of M9 medium supplemented with 100 μg/ml of spectinomycin and 100 μg/ml of ampicillin are introduced into a 250 ml baffled Erlenmeyer flask and inoculated with the 10 ml culture so that an optical density (600 nm) of 0.2 is obtained. Culturing is done at 30° C. and 200 rpm in a shaker-incubator. When an optical density (600 nm) of from 0.4 to 0.5 has been reached, the gene expression is induced by adding 1 mM of IPTG (time t₀). The strains are cultured for at least another 24 hours under identical conditions. During the culture period, 2 ml samples are taken, and the concentration of fatty acid methyl esters or fatty acid ethyl esters with different carbon chain lengths is quantified analogously to Example 7. This demonstrates that the strains E. coli W3110 ΔfadE pCDF[fadD-atfA]-/pJ294[Ptac-ChFATB2_optEc] and E. coli W3110 ΔfadE pCDF[fadD-atfA]-[alkL]/pJ294[Ptac-ChFATB2_optEc] are predominantly capable of forming C8:0-Me caprylic acid methyl ester, C10:0-Me capric acid methyl ester, C16:0-Me palmitic acid methyl ester, C16:1-Me palmitoleic acid methyl ester and C18:1-Me oleic acid methyl ester (when methanol is added) and C8:0-Et caprylic acid ethyl ester, C10:0-Et capric acid ethyl ester, C16:0-Et palmitic acid ethyl ester, C16:1-Et palmitoleic acid ethyl ester and C18:1-Et oleic acid ethyl ester (when ethanol is added), respectively.

[0265] Furthermore, it is demonstrated that the strains E. coli W3110 ΔfadE pCDF[fadD-atfA]-/pJ294[Ptac-CpFATB2_optEc] and E. coli W3110 ΔfadE pCDF[fadD-atfA]-[alkL]/pJ294[Ptac-CpFATB2_optEc] are capable of predominantly forming C12:0-Me lauric acid methy ester, C14:0-Me myristic acid methyl ester, C16:0-Me palmitic acid methyl ester, C16:1-Me palmitoleic acid methyl ester, C18:0-Me stearic acid methyl ester and C18:1-Me oleic acid methyl ester (when methanol is added) and C12:0-Et lauric acid ethyl ester, C14:0-Et myristic acid ethyl ester, C16:0-Et palmitic acid ethyl ester, C16:1-Et palmitoleic acid ethyl ester and C18:1-Et oleic acid ethyl ester (when ethanol is added), respectively.

[0266] Furthermore, it is demonstrated that the strains E. coli W3110 ΔfadE pCDF[fadD-atfA]-/pJ294[Ptac-ChFATB1_optEc] and E. coli W3110 ΔfadE pCDF[fadD-atfA]-[alkL]/pJ294[Ptac-ChFATB1_optEc] are capable of predominantly forming C14:0-Me methyl myristate, C16:0-Me methyl palmitate, C16:1-Me methyl palmitoleate, C18:0-Me methyl stearate and C18:1-Me methyl oleate (when methanol is added) and C14:0-Et ethyl myristate, C16:0-Et ethyl palmitate, C16:1-Et ethyl palmitoleate and C18:1-Et ethyl oleate (when ethanol is added), respectively. Finally, it is demonstrated that the strains E. coli W3110 ΔfadE pCDF[fadD-atfA]-[alkL]/pJ294[Ptac-ChFATB2_optEc], E. coli W3110 ΔfadE pCDF[fadD-atfA]-[alkL]/pJ294[Ptac-CpFATB2_optEc] and E. coli W3110 ΔfadE pCDF[fadD-atfA]-[alkL]/pJ294[Ptac-ChFATB1_optEc]ₜ, which are named in this example, form substantially more of the respective fatty acid methyl esters (when methanol is added) and fatty acid ethyl esters (when ethanol is added), respectively, than the strains E. coli W3110 ΔfadE pCDF[fadD-atfA]/pJ294[Ptac-ChFATB2_optEc], E. coli W3110 ΔfadE pCDF[fadD-atfA]/pJ294[Ptac-CpFATB2_optEc] and E. coli W3110 ΔfadE pCDF[fadD-atfA]/pJ294[Ptac-ChFATB1_optEc]. This demonstrates that the enhancement of the alkL gene product promotes the production of fatty acid esters with various chain lengths of the alkyl chain both of the fatty acid residue and the alcohol residue of the fatty acid esters and with a different degree of saturation of the alkyl chain of the fatty acid, respectively, from unrelated carbon sources.

### Example 9

### Preparation of Expression Vectors for the Genes CnfatB3 from Cocos nucifera and synUcTE from Umbellularia californica

[0267] To prepare expression vectors for the genes fatB3 (SEQ ID No. 35) from Cocos nucifera and synUcTE (SEQ ID No. 37) from Umbellularia californica (each encoding one enzyme Eᵢ), these genes were codon-optimized for expression in Escherichia coli. The genes were synthesized in each case together with a tac promoter (SEQ ID No. 39) and at the same time a cleavage site was introduced upstream of the promoter and a cleavage site was introduced downstream of the terminator. The synthesized DNA fragments P_{tac}-CnFATB3 and P_{tac} synUcTE were digested with the restriction endonucleases BamHI and NotI and ligated into the correspondingly cut vector pJ294 (DNA2.0 Inc., Menlo Park, Calif., USA). The completed E. coli expression vectors were termed pJ294{Ptac}[CnFATB3(co_Ec)] (SEQ ID No. 40), pJ294[Ptac-synUcTE] (SEQ ID No. 41). The vector pJ294 is an E. coli vector which imparts ampicillin resistance and also carries a p15A replication origin and therefore has a low copy number (10-15 copies per cell).

### Example 10

### Preparation of Expression Vectors for the Genes alkL_Oa from Oceanocaulis alexandrii, alkL_Ma from Marinobacter aquaeolei, alkL_CspK31 from Caulobacter sp. K31

[0268] To prepare expression vectors for the genes alkL_Oa (SEQ ID No. 42) from Oceanocaulis alexandrii HTCC2633, alkL_Ma (SEQ ID No. 44) from Marinobacter aquaeolei VT8, alkL_CspK31 (SEQ ID No. 46) from Caulobacter sp. K31 (in each case encoding one AlkL gene product), these genes were synthesized together with a lacuv5 promoter (SEQ ID No. 34). The synthesized DNA fragments P_{lacuv5} alkL_Oa, P_{lacuv5} alkL_Ma and P_{lacuv5} alkL_CspK31 were amplified with introduction of homologous regions for recombination cloning.

[0269] The following oligonucleotides were used for amplification of the target genes.

(SEQ ID No. 48)

| | |
|---|---|
| alkL_H1_fw: | 5′-GCTTACTGAATTTGCCTGAACCATGGGGCAGTGA |
| | G-3′ |

(SEQ ID No. 49)

| | |
|---|---|
| alkL_H2_rv: | 5′-TTCTGAAGTGGGGGCGGCCGCCCTTTTGACGGGTAC |
| | C-3′ |

[0270] The following parameters were used for the PCR: 1×: initial denaturation, 98° C., 1 min; 35×: denaturation, 98° C., 0:15 min, annealing, 60° C., 0:45 min; elongation, 72° C., 1:30 min; 1×: terminal elongation, 72° C., 10 min. For the amplification, the Phusion™ High-Fidelity Master Mix from New England Biolabs (Frankfurt) was used in accordance with the manufacturer's recommendations. In each case 50 μl of the PCR reactions were then separated on a 1% strength TAE agarose gel. The PCR, agarose gel electrophoresis, ethidium bromide staining of the DNA and determination of the PCR fragment sizes were carried out in a manner known to those skilled in the art. In all cases PCR fragments of the expected size were able to be amplified. These were 906 base pairs for P_{lacuv5} alkL_Oa, 960 base pairs for P_{lacuv5} alkL_Ma and 903 base pairs for P_{lacuv5} alkL_CspK31. To isolate the DNA from the TAE agarose gel, the target DNA was cut out of the gel with a scalpel and purified using the QiaQuick Gel extraction kit according to the manufacturer's instructions (Qiagen, Hilden). The purified PCR products were cloned together with the NotI-cut vector pJ294[Ptac-ChFATB2_optEc] (SEQ ID No. 11) by recombination, using the Geneart® Seamless Cloning and Assembly Kit according to the manufacturer's instructions (Life Technologies, Carlsbad, Calif., USA). From the resultant pJ294 derivatives pJ294{Ptac}[ChFATB2(co_Ec){Placuv5}[alkL_Oa] (SEQ ID No. 50), pJ294{Ptac}[ChFATB2(co_Ec){Placuv5}[alkL_Ma] (SEQ ID No. 51) and pJ294{Ptac}[ChFATB2(co_Ec){Placuv5}[alkL_CspK31] (SEQ ID No. 52) the fragments P_{lacuv5} alkL_Oa, P_{lacuv5} alkL_Ma and P_{lacuv5} alkL_CspK31 were cut out using a restriction digest with the restriction endonucleases NcoI and NotI and ligated into the corresponding cut vector pCDFDuet-1 (71340-3, Merck, Darmstadt; SEQ ID No. 53). Chemically competent E. coli DH5α (New England Biolabs, Frankfurt) was transformed in a manner known to those skilled in the art. Correct insertion of the target genes was examined by restriction analysis, and authenticity of the introduced genes was validated by DNA sequencing. The resultant expression vectors were named pCDF[alkL_Oa] (SEQ ID No. 54), pCDF[alkL_Ma] (SEQ ID No. 55) and pCDF[alkL_CspK31] (SEQ ID No. 56).

### Example 11

### HPLC/ESI-Based Quantification of Fatty Acids

[0271] Octanoic acid, 3-hydroxydecanoic acid, decanoic acid, lauric acid, 3-hydroxymyristic acid, myristic acid, palmitoleic acid, palmitic acid, oleic acid and stearic acid in fermentation samples were quantified by means of HPLC-ESI/MS on the basis of internal calibration for all analytes and using the internal standards D3-lauric acid (methyl-D3, 99%) for octanoic acid, 3-hydroxydecanoic acid, decanoic acid, lauric acid, 3-hydroxymyristic acid, myristic acid, palmitoleic acid and D3-stearic acid (methyl-D3, 98%) for palmitic acid, oleic acid, stearic acid.

[0272] The following apparatuses were used:
[0273] HPLC system: Surveyor (Thermo Fisher Scientific, Waltham, Mass., USA), consisting of Surveyor MS Pump, Surveyor Autosampler plus and Surveyor PDA Surveyor
[0274] Mass spectrometer: TSQ Vantage with HESI II—source (Thermo Fisher Scientific, Waltham, Mass., USA)
[0275] HPLC columns: XBridge BEH C8, 100×2.1 mm, particle size: 2.5 μm, pore size 130 Å (Waters, Milford Mass., USA)

[0276] The samples were prepared in that 1200 μl of acetone and 300 μl of sample were mixed for approximately 10 seconds and then centrifuged at approximately 13 000 rpm for 5 min. The clear supernatant was taken off and analysed after appropriate dilution with acetone. To each 900 μl of the diluted sample were added 100 μl of ISTD by pipette.

[0277] HPLC separation proceeded using the abovementioned HPLC column. The injection volume was 2 μl, the column temperature was 25° C., and the flow rate was 0.3 ml/min. The mobile phase consisted of eluent A (water+10 mmol of ammonium acetate adjusted with ammonia to pH=9) and eluent B (acetonitrile/eluent A 95/5). The following gradient profile was used

| Time [min] | Eluent A [%] | Eluent B [%] |
|---|---|---|
| 0 | 95 | 5 |
| 1 | 95 | 5 |
| 1.1 | 70 | 30 |
| 7 | 5 | 95 |
| 8 | 5 | 95 |

[0278] The ESI-MS analysis proceeded with negative ionization using the following parameters of the ESI source:
[0279] Spray voltage: 3000 V
[0280] Vaporizer temperature: 380° C.
[0281] Sheath gas pressure: 40
[0282] Aux gas pressure: 15
[0283] Capillary temperature: 380° C.

[0284] The individual compounds were detected and quantified using “single ion monitoring” (SIM) using the following parameters:

| | Ion | Scan | Scan | Peak |
|---|---|---|---|---|
| | [M − H]⁻ | width | time | width |
| Analyte | [m/z] | [m/z] | [ms] | Q₃ |
| Octanoic acid | 143.13 | 0.002 | 100 | 0.7 |
| 3-Hydroxydecanoic acid | 187.13 | 0.002 | 50 | 0.7 |
| Decanoic acid | 171.13 | 0.002 | 100 | 0.7 |
| Lauric acid | 199.16 | 0.002 | 50 | 0.7 |
| 3-Hydroxymyristic acid | 243.18 | 0.002 | 50 | 0.7 |
| Myristic acid | 227.19 | 0.002 | 50 | 0.7 |
| Palmitoleic acid | 253.18 | 0.002 | 50 | 0.7 |
| Palmitic acid | 255.22 | 0.002 | 30 | 0.7 |
| Oleic acid | 281.23 | 0.002 | 30 | 0.7 |
| Stearic acid | 283.25 | 0.002 | 30 | 0.7 |
| D3-lauric acid | 202.16 | 0.002 | 50 | 0.7 |
| D3-stearic acid | 286.25 | 0.002 | 30 | 0.7 |

### Example 12

### Production of Fatty Acids by E. coli Strains with a Deletion in the fadE Gene, which Overexpresses the Genes alkL from Pseudomonas putida GPo1, alkL from Oceanocaulis alexandrii HTCC2633 or alkL from Caulobacter sp. K31 and fatB1 from Cuphea hookeriana, fatB2 from Cuphea hookeriana, synUcTE from Umbellularia californica or fatB3 from Cocos nucifera

[0285] To generate E. coli strains having the expression vector for the gene alkL from Pseudomonas putida GPo1, alkL from Oceanocaulis alexandrii HTCC2633 or alkL from Caulobacter sp. K31 in combination with the expression vector for the fatB1 gene from Cuphea hookeriana, fatB2 from Cuphea hookeriana, synUcTE from Umbellularia californica or fatB3 from Cocos nucifera electrocompetent cells of E. coli W3110 ΔfadE and E. coli JW5020-1 Kan^{S} were prepared. This was carried out in a manner known to those skilled in the art. E. coli JW5020-1 Kan^{S} is a derivative of E. coli JW5020-1 (CGSC, The coli genetic stock center, Yale University, New Haven, USA), and this in turn is an E. coli BW25113 derivative, which carries a deletion of the fadE gene. The fadE gene was replaced by a kanamycin cassette. This was removed before equipping the strain with the expression vectors using a helper plasmid which encodes flp recombinase, in a manner known to those skilled in the art (see Datsenko K. A. and Wanner B. L. (2000) PNAS 97(12):6640-6645) resulting in strain E. coli JW5020-1 Kan^{S}. E. coli JW5020-1 Kan^{S} was transformed with the plasmids pJ294[Ptac-ChFATB1_optEc] (SEQ ID No. 12), pJ294[Ptac-ChFATB2_optEc] (SEQ ID No. 11) or pJ294{Ptac}[CnFATB3(co_Ec)] (SEQ ID No. 40) in combination with pCDFDuet-1, pCDF[alkL] (SEQ ID No. 7) or pCDF[alkL_Oa] (SEQ ID No. 54) or pCDF[alkL_CspK31] (SEQ ID No. 56), and E. coli W3110 ΔfadE was transformed with the plasmids pJ294[Ptac-synUcTE] (SEQ ID No. 41) in combination with pCDFDuet-1 (SEQ ID No. 53) or pCDF[alkL] (SEQ ID No. 7) and plated onto LB-agar plates with spectinomycin (100 μg/ml) and ampicillin (100 μg/ml). Transformants were checked for presence of the correct plasmids by plasmid preparation and analytical restriction analysis.

[0286] The following E. coli strains were generated in this manner:
[0287] E. coli JW5020-1 Kan^{S} pJ294[Ptac-ChFATB1_optEc]/pCDFDuet-1
[0288] E. coli JW5020-1 Kan^{S} pJ294[Ptac-ChFATB1_optEc]/pCDF[alkL]
[0289] E. coli JW5020-1 Kan^{S} pJ294[Ptac-ChFATB2_optEc]/pCDFDuet-1
[0290] E. coli JW5020-1 Kan^{S} pJ294[Ptac-ChFATB2_optEc]/pCDF[alkL_Oa]
[0291] E. coli JW5020-1 Kan^{S} pJ294[Ptac-ChFATB2_optEc]/pCDF[alkL_CspK31]
[0292] E. coli JW5020-1 Kan^{S} pJ294{Ptac}[CnFATB3(co_Ec)]/pCDFDuet-1
[0293] E. coli JW5020-1 Kan^{S} pJ294{Ptac}[CnFATB3(co_Ec)]/pCDF[alkL]
[0294] E. coli W3110 ΔfadE pJ294[Ptac-synUcTE]/pCDFDuet-1
[0295] E. coli W3110 ΔfadE pJ294[Ptac-synUcTE]/pCDF[alkL]

[0296] These strains were employed to investigate their ability to produce fatty acids. The following procedure was used:

[0297] The strains were subjected to a multistage aerobic culturing process. The strains under investigation were first initially grown in Luria-Bertani Bouillon according to Miller (Merck, Darmstadt) with 100 μg/ml ampicillin and 100 μg/ml spectinomycin as 5 ml preliminary culture from one single colony each. The next culturing step proceeded in M9 medium. The medium, consisting of 38 mM disodium hydrogenphosphate dihydrate, 22 mM potassium dihydrogenphosphate, 8.6 mM sodium chloride, 37 mM ammonium chloride, 2% (w/v) glucose, 2 mM magnesium sulphate heptahydrate (all substances from Merck, Darmstadt) and 0.1% (v/v) trace element solution, was adjusted to a pH of 7.4 using 25% strength ammonium hydroxide solution. The added trace element solution consisting of 9.7 mM manganese(II) chloride tetrahydrate, 6.5 mM zinc sulphate heptahydrate, 2.5 mM sodium EDTA (Titriplex III), 4.9 mM boric acid, 1 mM sodium molybdate dihydrate, 32 mM calcium chloride dihydrate, 64 mM iron(II) sulphate heptahydrate and 0.9 mM copper(II) chloride dihydrate dissolved in 1 M hydrochloric acid (all substances from Merck, Darmstadt) was sterile-filtered before addition to the M9 medium. 10 ml of M9 medium were charged with 100 μg/ml spectinomycin and 100 μg/ml ampicillin into 100 ml conical flasks with chicane and inoculated with 0.5 ml from the preliminary culture. The culturing proceeded at 37° C. and 200 rpm in an incubating shaker. After a cultivating time of 8 hours, 50 ml of M9 medium containing 100 μg/ml of spectinomycin and 100 μg/ml of ampicillin are charged into a 250 ml conical flask with chicane and inoculated with the 10 ml culture, in such a manner that an optical density (600 nm) of 0.2 is achieved. The cuturing proceeded at 37° C. and 200 rpm in an incubating shaker. When an optical density (600 nm) of 0.6 to 0.8 is achieved, gene expression is induced by adding 1 mM IPTG. The strains were cultured for a further 24 hours at 30° C. and 200 rpm. During the culturing, samples of 300 μl are taken off and the concentration of fatty acids of differing carbon chain lengths is quantified as described in Example 10. The results are shown in the tables hereinafter.

[0298] Production of fatty acids using E. coli JW5020-1 Kan^{S}, which overexpresses fatB2 from C. hookeriana and alkL from Oceanocaulis alexandrii HTCC2633 and alkL from Caulobacter sp.

[0299] K31. The concentrations of fatty acids of differing carbon chain length are reported after culturing for 24 hours (n.d.=not detectable):

| | c_{Caprylic acid} | c_{Capric acid} | c_{Palmitoleic acid} | C_{Vaccenic acid} |
|---|---|---|---|---|
| Strain | [mg/l/OD] | [mg/l/OD] | [mg/l/OD] | [mg/l/OD] |
| E. coli JW5020-1 Kan^{S} pJ294[Ptac- | 21.0 | 1.8 | 0.1 | 1.3 |
| ChFATB2_optEc]/pCDFDuet-1 | | | | |
| E. coli JW5020-1 Kan^{S} pJ294[Ptac- | 27.5 | 6.3 | 5.9 | 2.3 |
| ChFATB2_optEc]/pCDF[alkL_Oa] | | | | |
| E. coli JW5020-1 Kan^{S} pJ294[Ptac- | 38.6 | 4.7 | | |
| ChFATB2_optEc]/pCDF[alkL_CspK31] | | | | |

[0300] Production of fatty acids with E. coli JW5020-1 Kan^{S}, which overexpresses fatB3 from C. nucifera and alkL from Pseudomonas putida GPo1. The concentrations of fatty acids of differing carbon chain length are reported after 48 hours of culturing (n.d.=not detectable):

| | C_{Caprylic acid} | C_{Lauric acid} | C_{Myristic acid} | C_{Palmitoleic acid} | C_{Palmitic acid} | C_{Vaccenic acid} |
|---|---|---|---|---|---|---|
| Strain | [mg/l/OD] | [mg/l/OD] | [mg/l/OD] | [mg/l/OD] | [mg/l/OD] | [mg/l/OD] |
| E. coli JW5020-1 Kan^{S} | 0.1 | 3.2 | 4.5 | 13.4 | 1.7 | 4.0 |
| pJ294{Ptac}[CnFATB3(co_Ec)]/pCDFDuet-1 | | | | | | |
| E. coli JW5020-1 Kan^{S} | 0.5 | 6.8 | 9.9 | 21.2 | 3.1 | 5.6 |
| pJ294{Ptac}[CnFATB3(co_Ec)]/pCDF[alkL] | | | | | | |

[0301] Production of fatty acids with E. coli JW5020-1 Kan^{S}, which overexpresses fatB1 from C. hookeriana and alkL from Pseudomonas putida GPo1. The concentrations of fatty acids of differing carbon chain lengths are reported after 24 hours of culturing (n.d.=not detectable):

| | c_{Myristic acid} | c_{Palmitoleic acid} |
|---|---|---|
| Strain | [mg/l/OD] | [mg/l/OD] |
| E. coli JW5020-1 Kan^{S} pJ294[Ptac- | 38.2 | 0.1 |
| ChFATB1_optEc]/pCDFDuet-1 | | |
| E. coli JW5020-1 Kan^{S} pJ294[Ptac- | 42.8 | 62.0 |
| ChFATB1_optEc]/pCDF[alkL] | | |

[0302] Production of fatty acids using E. coli JW5020-1 Kan^{S}, which overexpresses synUcTE from U. californica and alkL from Pseudomonas putida GPo1. The concentrations of fatty acids of differing carbon chain lengths are reported after 24 hours of culturing (n.d.=not detectable):

| | c_{Lauric acid} | c_{Myristic acid} |
|---|---|---|
| Strain | [mg/l/OD] | [mg/l/OD] |
| E. coli W3110 ΔfadE pJ294[Ptac- | 0.1 | 0.1 |
| synUcTE]/pCDFDuet-1 | | |
| E. coli W3110 ΔfadE pJ294[Ptac- | 20.1 | 1.9 |
| synUcTE]/pCDF[alkL] | | |

[0303] Therefore it was found that strains which overexpress alkL from P. putida, O. alexandrii or Caulobacter sp. are able to form more caprylic acid, capric acid, lauric acid, myristic acid, palmitic acid, palmitoleic acid or vaccenic acid, depending on the specificity of the overexpressed acyl-ACP thioesterase. This shows that reinforcement of alkL is required for the preparation of fatty acids of differing chain lengths and degrees of saturation from unrelated carbon sources.

### Example 13

### Preparation of Vectors for the Coexpression of the Genes fatB2 from Cuphea hookeriana, fatB3 from Cocos nucifera, synUcTE from Umbellularia californica with alkL from Pseudomonas putida

[0304] For preparation of vectors for the coexpression of the gene fatB2 (SEQ ID No. 8) from Cuphea hookeriana, fatB3 (SEQ ID No. 35) from Cocos nucifera, synUcTE (SEQ ID No. 37) from Umbellularia californica with an alkL gene from Pseudomonas putida, the gene alkL (SEQ ID No. 1) was amplified together with the lacuv5 promotor and terminator from the vector pCDF[alkL] (SEQ ID No. 7).

[0305] For amplification of the fragment P-alkL-T (SEQ ID No. 58) for coexpression with fatB2 and synUcTE, the following oligonucleotides were used.

(SEQ ID No. 59)

| | |
|---|---|
| NP-FA-P19: | 5′-ATCCGCTCACAATTGCAAATGCCTGAGGTTTCAG |
| | C-3′ |

(SEQ ID No. 60)

| | |
|---|---|
| NP-FA-P20: | 5′-CTTCCCTTCATTTTGGTCTCGGTCGATCATTCAG |
| | C-3′ |

[0306] For amplification of the fragment P-alkL-T (SEQ ID No. 58) for coexpression with fatB3, the following oligonucleotides were used.

(SEQ ID No. 59)

| | |
|---|---|
| NP-FA-P19: | 5′-ATCCGCTCACAATTGCAAATGCCTGAGGTTTCAG |
| | C-3′ |

(SEQ ID No. 61)

| | |
|---|---|
| NP-FA-P21: | 5′-ACTTAGTCGCTGAAGGTCTCGGTCGATCATTCAG |
| | C-3′ |

[0307] The following parameters were used for the PCR: 1×: initial denaturation, 98° C., 1 min; 35×: denaturation, 98° C., 0:15 min, annealing, 65° C., 0:45 min; elongation, 72° C., 1:30 min; 1×: terminal elongation, 72° C., 10 min. For the amplification, the Phusion™ High-Fidelity Master Mix from New England Biolabs (Frankfurt) was used in accordance with the recommendations of the manufacturer. In each case 50 μl of the PCR reactions were then separated on a 1% strength TAE agarose gel. The PCR, agarose gel electrophoresis, ethidium bromide staining of the DNA and determination of the PCR fragment sizes were carried out in a manner known to those skilled in the art. The PCR fragments with an expected size of 1095 base pairs were able to be amplified. To isolate the DNA from the TAE agarose gel, the target DNA was cut out from the gel with a scalpel and purified by the QiaQuick Gel extraction Kit according to the manufacturer's instructions (Qiagen, Hilden). The purified PCR products were cloned together with the above-described vectors pJ294[Ptac-ChFATB2_optEc] (SEQ ID No. 11), pJ294{Ptac}[CnFATB3(co_Ec)] (SEQ ID No. 40), pJ294[Ptac-synUcTE] (SEQ ID No. 41), which were linearized with BamHI, by means of recombination, using the Geneart® Seamless Cloning and Assembly Kit according to the manufacturer's instructions (Life Technologies, Carlsbad, Calif., USA). The resultant expression vectors were named pJ294{Placuv5}[alkL]{Ptac}[ChFATB2(co_Ec)] (SEQ ID No. 62), pJ294{Placuv5}[alkL]{Ptac}[CnFATB3(co_Ec)] (SEQ ID No. 63) and pJ294{Placuv5}[alkL]{Ptac}[synUcTE(co_Ec)] (SEQ ID No. 64). The transformation of chemically competent E. coli DH5α proceeded in a manner known to those skilled in the art. Correct insertion of the target genes was checked by restriction analysis and the authenticity of the insert was verified by DNA sequencing.

### Example 14

### Preparation of Expression Vectors for the Genes fadD from Escherichia coli and Wax-dgaT (atfA) from Acinetobacter Sp. ADP1 and atfA1 from Alcanivorax borkumensis

[0308] To produce expression vectors for the genes fadD (SEQ ID No. 57) from Escherichia coli (encoding an enzyme Eᵥᵢ) and wax-dgaT (atfA in Example 5) (SEQ ID No. 65) from Acinetobacter sp. ADP1 and atfA1 (SEQ ID No. 67) from Alcanivorax borkumensis SK2 (in each case encoding an enzyme Eᵥ), the genes wax-dgaT and atfA1 were codon-optimized for expression in Escherichia coli and synthesized in combination with the gene fadD from E. coli. The synthesized DNA fragments wax-dgaT_AsADP1-fadD_Ec (SEQ ID No. 69) and atfA1_Ab-fadD_Ec (SEQ ID No. 70) were amplified with introduction of homologous regions for recombination cloning.

[0309] To amplify the fragment wax-dgaT_AsADP1-fadD_Ec, the following oligonucleotides were used:

(SEQ ID No. 71)

| | |
|---|---|
| wax-dgaT_H1_fw: | 5′-ACAGGAGGTAAAACATATGCGTCCTCTGCACC |
| | CG-3′ |

(SEQ ID No. 72)

| | |
|---|---|
| fadD_H2_rv: | 5′-GTTTCTTTACCAGACTCGAGATTGTTTTCTCT |
| | TTAGTGGGCGTC-3′ |

[0310] To amplify the fragment atfA1_Ab-fadD_Ec, the following oligonucleotides were used:

(SEQ ID No. 73)

| | |
|---|---|
| atfA_Ab_fw_kurz: | 5′-ACAGGAGGTAAAACATATGAAAGCGCT |
| | GTCCC-3′ |

(SEQ ID No. 74)

| | |
|---|---|
| fadD_H2_rv_N: | 5′-GTTTCTTTACCAGACTCGAGATTGTTT |
| | TCTCTTTAGTGGGC-3′ |

[0311] The following parameters were used for the PCR: 1×: initial denaturation, 98° C., 0:30 min; 35×: denaturation, 98° C., 0:10 min, annealing, 70° C., 0:20 min; elongation, 72° C., 1 min; 1×: terminal elongation, 72° C., 10 min. For the amplification, the Phusion™ High-Fidelity Master Mix from New England Biolabs (Frankfurt) was used in accordance with the manufacturer's recommendations. Each 50 μl of the PCR reactions was then separated on a 1% strength TAE agarose gel. The PCR, agarose gel electrophoresis, ethidium bromide staining of the DNA and determination of the PCR fragment sizes was carried out in a manner known to those skilled in the art. In both cases, PCR fragments of the expected size were able to be amplified. These were for wax-dgaT_AsADP1-fadD_Ec 3192 base pairs and atfA1_Ab-fadD_Ec 3189 base pairs. To isolate the DNA from the agarose gel, the target DNA was cut out of the gel using a scalpel and purified with the QiaQuick Gel extraction kit according to the manufacturer's instructions (Qiagen, Hilden). The purified PCR products were cloned into a NdeI- and XhoI-cut pCDF derivative which already contains a synthetic tac promotor (SEQ ID No. 39), by recombination, using the Geneart® Seamless Cloning and Assembly Kit according to the manufacturer's instructions (Life Technologies, Carlsbad, Calif., USA). Chemically competent E. coli DH5α (New England Biolabs, Frankfurt) was transformed in a manner known to those skilled in the art. Correct insertion of the target genes was checked by restriction analysis and the authenticity of the introduced genes was verified by DNA sequencing. The resultant expression vectors were named pCDF[wax-dgaT_AsAPD1(co_Ec)-fadD_Ec] (SEQ ID No. 75) and pCDF[atfA1_Ab(co_Ec)-fadD_Ec] (SEQ ID No. 76).

### Example 15

### Gas-Chromatographic Quantification of Fatty Acid Methyl Esters

[0312] Fatty acid methyl esters were quantified in the culture broth by means of gas chromatography. 500 mg/l of heptadecanoic acid methyl ester were added to the culture broth as internal reference substance. The culture broth was shaken in an equivalent volume of n-heptane for 15 min at 12 Hz to extract the fatty acid methyl esters. For phase separation, the sample was centrifuged for 10 min at 16 000×g and the organic phase was measured by gas chromatography. To separate fatty acid methyl esters, the capillary column SP™-2560 with the dimensions 100 m×0.25 mm and a film thickness of 0.2 μm (Supelco, Sigma-Aldrich, Steinheim) was used as stationary phase. The carrier gas used was helium. The separation proceeded in the course of 45 min with an injector temperature of 260° C., detector temperature of 260° C. and column temperature of 140° C. at the start, held for 5 min and increased to 240° C. at a rate of 4° C./min and held for 15 min. The injection volume was 1 μl, the split rate 1:20 and the flow rate of the carrier gas 1 ml/min. The detection was carried out by means of a flame-ionization detector (GC Perkin Elmer Clarus 500, Perkin Elmer, Rodgau). Heptadecanoic acid methyl ester (Sigma-Aldrich, Steinheim) was used as internal reference substance for quantifying the fatty acid methyl esters. The reference substances C8:0-Me caprylic acid methyl ester, C10:0-Me capric acid methyl ester, C12:0-Me lauric acid methyl ester, C14:0-Me myristic acid methyl ester, C16:0-Me palmitic acid methyl ester, C16:1-Me palmitoleic acid methyl ester, C18:0-Me stearic acid methyl ester, C18:1-Me oleic acid methyl ester (GLC Standard Mix GLC-20 1892-1AMP, GLC-30 1893-1AMP, GLC-50 1894-1AMP, Sigma-Aldrich, Steinheim) were used for calibration. The determination limits for all fatty acid methyl esters were at a concentration of 10 mg/l.

### Example 16

### Production of Fatty Acid Methyl Esters by E. coli Strains with Deletion in the fadE Gene which Overexpresses the Genes alkL from Pseudomonas putida GPo1 and a Plant Acyl-ACP Thioesterase and an Acyl-CoA Synthetase and a Wax-Ester Synthase

[0313] To generate E. coli strains having the expression vector for the genes alkL from Pseudomonas putida GPo1 and fatB2 from Cuphea hookeriana, fatB3 from Cocos nucifera and synUcTE from Umbellularia californica in combination with the expression vector for the genes fadD from Escherichia coli and wax-dgaT from Acinetobacter sp. ADP1 and atfA1 from Alcanivorax borkumensis SK2, electrocompetent cells of E. coli W3110 ΔfadE and E. coli JW5020-1 Kan^{S} were produced. This took place in a manner known to those skilled in the art. E. coli JW5020-1 Kan^{S} was transformed with the vectors pJ294{Placuv5}[alkL]{Ptac}[ChFATB2(co_Ec)] (SEQ ID No. 62) or pJ294[Placuv5}[alkL]{Ptac}[CnFATB3(co_Ec)] (SEQ ID No. 63) and pJ294[Ptac-ChFATB2_optEc] (SEQ ID No. 11) or pJ294{Ptac}[CnFATB3(co_Ec)] (SEQ ID No. 40) in combination with pCDF[atfA1_Ab(co_Ec)-fadD_Ec] (SEQ ID No. 76) and E. coli W3110 ΔfadE with the vectors pJ294{Placuv5}[alkL]{Ptac}[synUcTE] (SEQ ID No. 62) and pJ294[Ptac-synUcTE] (SEQ ID No. 41) in combination with pCDF[wax-dgaT_AsAPD1(co_Ec)-fadD_Ec] (SEQ ID No. 75) and were plated onto LB-agar plates containing spectinomycin (100 μg/ml) and ampicillin (100 μg/ml). Transformants were checked for the presence of the correct plasmids by plasmid preparation and analytical restriction analysis.

[0314] In this manner the E. coli strains hereinafter were generated:
[0315] E. coli JW5020-1 Kan^{S} pJ294[Ptac-ChFATB2_optEc]/pCDF[atfA1_Ab(co_Ec)-fadD_Ec]
[0316] E. coli JW5020-1 Kan^{S} pJ294{Placuv5}[alkL]{Ptac}[ChFATB2(co_Ec)]/pCDF[atfA1_Ab(co_Ec)-fadD_Ec]
[0317] E. coli JW5020-1 Kan^{S} pJ294{Ptac}[CnFATB3(co_Ec)]/pCDF[atfA1_Ab(co_Ec)-fadD_Ec]
[0318] E. coli JW5020-1 Kan^{S} pJ294{Placuv5}[alkL]{Ptac}[CnFATB3(co_Ec)]/pCDF[atfA1_Ab(co_Ec)-fadD_Ec]
[0319] E. coli W3110 ΔfadE pJ294[Ptac-synUcTE]/pCDF[wax-dgaT_AsAPD1(co_Ec)-fadD_Ec]
[0320] E. coli W3110 ΔfadE pJ294{Placuv5}[alkL]{Ptac}[synUcTE]/pCDF[wax-dgaT_AsAPD1(co_Ec)-fadD_Ec]

[0321] These strains were employed to investigate their ability to produce fatty acid methyl esters. In this process the following procedure was used:

[0322] The strains are subjected to a multistage aerobic culturing process. The strains under test were initially grown in Luria-Bertani Bouillon according to Miller (Merck, Darmstadt) containing 100 μg/ml of ampicillin and 100 μg/ml of spectinomycin as 5 ml preliminary culture from a single colony each time. The next culture step proceeded in M9 medium. The medium, consisting of 38 mM disodium hydrogenphosphate dihydrate, 22 mM potassium dihydrogenphosphate, 8.6 mM sodium chloride, 37 mM ammonium chloride, 2% (w/v) glucose, 2 mM magnesium sulphate heptahydrate (all substances from Merck, Darmstadt) and 0.1% (v/v) trace element solution was adjusted to pH 7.4 using 25% strength ammonium hydroxide solution. The added trace element solution consisting of 9.7 mM manganese(II) chloride tetrahydrate, 6.5 mM zinc sulphate heptahydrate, 2.5 mM sodium EDTA (Titriplex III), 4.9 mM boric acid, 1 mM sodium molybdate dihydrate, 32 mM calcium chloride dihydrate, 64 mM iron(II) sulphate heptahydrate and 0.9 mM copper(II) chloride dihydrate dissolved in 1 M hydrochloric acid (all substances from Merck, Darmstadt) was sterile-filtered before addition to the M9 medium. 10 ml of M9 medium were charged with 100 μg/ml of spectinomycin and 100 μg/ml of ampicillin into 100 ml conical flasks with chicane and inoculated with 0.5 ml from the preliminary culture. The culturing proceeded at 37° C. and 200 rpm in an incubating shaker. After a culturing time of 8 hours, 50 ml of M9 medium containing 100 μg/ml of spectinomycin and 100 μg/ml of ampicillin were charged in a 250 ml conical flask with chicane and inoculated with the 10 ml culture, in such a manner that an optical density (600 nm) of 0.2 was achieved. The culturing proceeded at 37° C. and 200 rpm in an incubating shaker. When an optical density (600 nm) of 0.6 to 0.8 is achieved, the gene expression is induced by adding 1 mM IPTG. The strains were cultured for a further 24 hours at 30° C. and 200 rpm. One hour after induction of gene expression, 1% (v/v) methanol is added to the culture broth. During the culturing, samples are withdrawn and the concentration of fatty acid methyl ester of different carbon chain lengths are quantified as described in Example 15. The results are shown in the tables hereinafter.

[0323] Production of fatty acid methyl esters with E. coli JW5020-1 Kan^{S} and E. coli W3110 ΔfadE, which overexpress one acyl-ACP thioesterase, fadD from E. coli and a wax-ester synthase. Strains with and without overexpression of alkL from P. putida GPo1 are shown. The concentrations of fatty acid methyl ester of differing carbon chain length are reported after 24 hours of culturing (n.d.=not detectable):

| | c_{Caprylic acid} | c_{Capric acid} | c_{Lauric acid} | c_{Myristic acid} |
|---|---|---|---|---|
| | _{methyl ester} | _{methyl ester} | _{methyl ester} | _{methyl ester} |
| Strain | [mg/L/OD] | [mg/L/OD] | [mg/L/OD] | [mg/L/OD] |
| E. coli W3110 ΔfadE pJ294[Ptac-synUcTE]/pCDF[wax- | n.d. | n.d. | 0.1 | 1.5 |
| dgaT_AsADP1(co_Ec)-fadD_Ec] | | | | |
| E. coli W3110 ΔfadE pJ294[alkL][Ptac-synUcTE]/ | n.d. | n.d. | 11.1 | 3.7 |
| pCDF[wax-dgaT_AsADP1(co_Ec)-fadD_Ec] | | | | |
| E. coli JW5020-1 Kan^{S} pJ294[Ptac-ChFATB2_optEc]/ | 8.0 | 4.0 | | |
| pCDF[atfA1_Ab(co_Ec)-fadD_Ec] | | | | |
| E. coli JW5020-1 Kan^{S} | 9.5 | 4.8 | | |
| pJ294{Placuv5}[alkL]{Ptac}[ChFATB2(co_Ec)]/ | | | | |
| pCDF[atfA1_Ab(co_Ec)-fadD_Ec] | | | | |
| E. coli JW5020-1 Kan^{S} pJ294{Ptac}[CnFATB3(co_Ec)]/ | n.d. | n.d. | 3.1 | 6.3 |
| pCDF[atfA1_Ab(co_Ec)-fadD_Ec] | | | | |
| E. coli JW5020-1 Kan^{S} | n.d. | n.d. | 4.3 | 8.5 |
| pJ294{Placuv5}[alkL]{Ptac}[CnFATB3(co_Ec)]/ | | | | |
| pCDF[atfA1_Ab(co_Ec)-fadD_Ec] | | | | |

[0324] It was thus shown that strains which overexpress alkL from P. putida are able to form more caprylic acid methyl ester, capric acid methyl ester, lauric acid methyl ester and myristic acid methyl ester, depending on the specificity of the overexpressed acyl-ACP thioesterase. This shows that a reinforcement of alkL is necessary for the preparation of fatty acid methyl esters of differing carbon chain length from unrelated carbon sources.

### Example 17

### Preparation of Expression Vectors for the Coexpression of Acyl-ACP Reductase Genes with the Acyl-CoA Synthetase Gene fadD from Escherichia coli and alkL from Pseudomonas putida

[0325] To produce expression vectors for the coexpression of fadD (SEQ ID No. 57) from Escherichia coli (encoding an enzyme Eᵥᵢ) and acrM (SEQ ID No. 77) from Acinetobacter sp. M-1, acr1b (SEQ ID No 79) from Acinetobacter sp. ADP1, acr1a (SEQ ID No. 81) from Acinetobacter sp. ADP1 and Maqu_{—}2220 (SEQ ID No. 83) from Marinobacter aquaeolei VT8 (encoding an enzyme Eₓ) and alkL from Pseudomonas putida (SEQ ID No. 1, encoding an AlkL gene product), the genes acr1a from Acinetobacter sp. ADP1 and Maqu_{—}2220 were codon-optimized for expression in Escherichia coli and these genes and the gene acrM from Acinetobacter sp. M-1 were synthesized (DNA2.0 Inc., Menlo Park, Calif., USA). These genes were amplified by PCR proceeding from the synthetic DNA and also the gene acr1b from Acinetobacter sp. ADP1 proceeding from chromosomal DNA as a matrix. Via the oligonucleotides used, the amplified DNA fragments were provided with homologous regions to the respective neighbouring fragment and to the PspXl-linearized target vector pCDF[alkL] (SEQ ID No. 7) for recombination cloning. At the same time, the gene fadD from Escherichia coli was amplified by PCR together with a synthetic tac promotor (SEQ ID No. 39) proceeding from a pCDF derivative as a matrix and likewise provided with homologous regions via the oligonucleotides used.

[0326] To produce the expression vector for the genes luxC, luxD and luxE from the lux operon of Photorhabdus luminescens and alkL from Pseudomonas putida GPo1, the luxCDE operon (SEQ ID No. 85) was codon-optimized for expression in Escherichia coli and synthesized (DNA2.0 Inc., Menlo Park, Calif., USA). The operon was amplified by PCR proceeding from the synthesized DNA as matrix, and the tac promotor, proceeding from a pCDF derivative which contains this promotor (SEQ ID No. 39). Both DNA fragments were provided via the oligonucleotides used with homologous regions for the target vector to the respective neighbouring fragment and to the linearized target vector for the recombination cloning.

[0327] The following oligonucleotides were employed in amplification of the tac promotor, the acyl-CoA synthetase gene and the acyl-ACP reductase genes for the coexpression with alkL:

P_{tac} and fadD for the coexpression with acr1a
[Acinetobacter sp. ADP1]:
(SEQ ID No. 86)

| | |
|---|---|
| NP-FA-P1: | 5′-TTTTCTAAGGTACCCGATAACAATTACGAGCTT |
| | CATG-3′ |

(SEQ ID No. 87)

| | |
|---|---|
| NP-FA-P2: | 5′-CTCCTTCAGCTCAGGCTTTATTGTCCAC-3′ |

P_{tac} and fadD for the coexpression with acrM
[Acinetobacter sp. M-1]:
(SEQ ID No. 86)

| | |
|---|---|
| NP-FA-P1: | 5′-TTTTCTAAGGTACCCGATAACAATTACGAGCTT |
| | CATG-3′ |

(SEQ ID No. 88)

| | |
|---|---|
| NP-FA-P5: | 5′-CTCCTTCAGCTCAGGCTTTATTGTC-3′ |

P_{tac} and fadD for the coexpression with Maqu_2220
[Marinobacterium aquaeolei VT8]:
(SEQ ID No. 86)

| | |
|---|---|
| NP-FA-P1: | 5′-TTTTCTAAGGTACCCGATAACAATTACGAGCTT |
| | CATG-3′ |

(SEQ ID No. 89)

| | |
|---|---|
| NP-FA-P8: | 5′-TCCTTCTCGCTCAGGCTTTATTGTCC-3′ |

P_{tac} and fadD for the coexpression with acr1b
[Acinetobacter sp. ADP1]:
(SEQ ID No. 86)

| | |
|---|---|
| NP-FA-P1: | 5′-TTTTCTAAGGTACCCGATAACAATTACGAGCTT |
| | CATG-3′ |

(SEQ ID No. 90)

| | |
|---|---|
| NP-FA-P14: | 5′-CCTGATTGGCTCAGGCTTTATTGTC-3′ |

P_{tac} for the expression of luxCDE
[Photorhabdus luminescens]:
(SEQ ID No. 86)

| | |
|---|---|
| NP-FA-P1: | 5′-TTTTCTAAGGTACCCGATAACAATTACGAGCTT |
| | CATG-3′ |

(SEQ ID No. 91)

| | |
|---|---|
| NP-FA-P11: | 5′-ACCTCCTAGTTTTACCTCCTGTTAAACAA-3′ |

acr1a [Acinetobacter sp. ADP1]:
(SEQ ID No. 92)

| | |
|---|---|
| NP-FA-P3: | 5′-CCTGAGCTGAAGGAGTTACAGTTTGATC-3′ |

(SEQ ID No. 93)

| | |
|---|---|
| NP-FA-P4: | 5′-GTTTCTTTACCAGACTTATCACCAGTGCTCACC |
| | -3′ |

acrM [Acinetobacter sp. M1]:
(SEQ ID No. 94)

| | |
|---|---|
| NP-FA-P6: | 5′-CCTGAGCTGAAGGAGTTACAGTATGAATG-3′ |

(SEQ ID No. 95)

| | |
|---|---|
| NP-FA-P7: | 5′-GTTTCTTTACCAGACTTATTACCAGTGTTCG- |
| | 3′ |

Maqu_2220 [Marinobacterium aquaeolei VT8]:
(SEQ ID No. 96)

| | |
|---|---|
| NP-FA-P9: | 5′-CCTGAGCGAGAAGGAGTTCTATCATGG-3′ |

(SEQ ID No. 97)

| | |
|---|---|
| NP-FA-P10: | 5′-GTTTCTTTACCAGACTCATTACGCGGCCTTTT |
| | TGC-3′ |

acr1b [Acinetobacter sp. ADP1]:
(SEQ ID No. 98)

| | |
|---|---|
| NP-FA-P15: | 5′-CCTGAGCCAATCAGGGAAAAACGCGTG-3′ |

(SEQ ID No. 99)

| | |
|---|---|
| NP-FA-P16: | 5′-GTTTCTTTACCAGACCTCTCGGTATGAGAGGC |
| | TTC-3′ |

luxCDE [Photorhabdus luminescens]:
(SEQ ID No. 100)

| | |
|---|---|
| NP-FA-P12: | 5′-GTAAAACTAGGAGGTAAAAAAAATGACG-3′ |

(SEQ ID No. 101)

| | |
|---|---|
| NP-FA-P13: | 5′-GTTTCTTTACCAGACTTAGCTATCGAACGAACG |
| | CCTCG-3′ |

[0328] The following parameters were used for the PCR: 1×: initial denaturation, 98° C., 0:30 min; 35×: denaturation, 98° C., 0:10 min, annealing, 60° C., 0:45 min; elongation, 72° C., 1:30 min; 1×: terminal elongation, 72° C., 10 min. For the amplification, the Phusion™ High-Fidelity Master Mix from New England Biolabs (Frankfurt) was used in accordance with the manufacturer's recommendations. In each case 50 μl of the PCR reactions were then separated on a 1% strength TAE-agarose gel. The PCR, the agarose-gel electrophoresis, ethidium bromide staining of the DNA and determination of the PCR fragment sizes were carried out in a manner known to those skilled in the art.

[0329] In all cases, PCR fragments of the expected size were able to be amplified. These were, for the tac promotor 171 base pairs, for the tac promotor and fadD for coexpression with acr1a [A.sp. ADP1] and Maqu2220 1927 base pairs, for coexpression with acrM 1919 base pairs and for coexpression with acr1b [A.sp. ADP1] 1933 base pairs. The PCR fragments for acr1a [A.sp. ADP1] were 952 base pairs, for acrM 906 base pairs, for Maqu2220 1561 base pairs, for acr1b [A.sp.ADP1] 903 base pairs, and for luxCDE 3621 base pairs. For isolation of the DNA from the agarose gel, the target DNA was cut out from the gel using a scalpel and purified using the QiaQuick Gel extraction kit according to the manufacturer's instructions (Qiagen, Hilden). The purified PCR products were cloned by recombination, using the Geneart® Seamless Cloning and Assembly Kit according to the manufacturer's instructions (Life Technologies, Carlsbad, Calif., USA) into the PspX/-linearized vector pCDF[alkL] (SEQ ID No. 7). Chemically competent E. coli DH5α (New England Biolabs, Frankfurt) was transformed in a manner known to those skilled in the art. The correct insertion of the target genes was checked by restriction analysis and the authenticity of the introduced genes was validated by DNA sequencing.

[0330] In this manner the following expression vectors resulted:

(SEQ ID No. 102)
• pCDF{Placuv5}[alkL]{Ptac}[fadD_Ec-acr1b_AsADP1]
(SEQ ID No. 103)
• pCDF{Placuv5}[alkL]{Ptac}
[fadD_Ec-acr1a_AsADP1(co_Ec)]
(SEQ ID No. 104)
• pCDF{Placuv5}[alkL]{Ptac}[fadD_Ec-acrM_AsM1]
(SEQ ID No. 105)
• pCDF{Placuv5}[alkL]{Ptac}
[fadD_Ec-Maqu2220(co_Ec)]
(SEQ ID No. 106)
• pCDF{Placuv5}[alkL]{Ptac}[luxCDE_Pl(co_Ec)]

[0331] For preparation of vectors for the coexpression of fadD from Escherichia coli and acrM from Acinetobacter sp. M-1, acr1b from Acinetobacter sp. ADP1, acr1a from Acinetobacter sp. ADP1 (codon-optimized) and Maqu_{—}2220 from Marinobacter aquaeolei VT8 (codon-optimized) and the expression of luxC, luxD and luxE from Photorhabdus luminescens (codon-optimized) without the coexpression of alkL, these genes were amplified by PCR starting from the previously generated expression vectors pCDF{Placuv5}[alkL]{Ptac}[fadD_Ec-acr1b_AsADP1], pCDF{Placuv5}[alkL]{Ptac}[fadD_Ec-acr1a_AsADP1(co_Ec)], pCDF{Placuv5}[alkL]{Ptac}[fadD_Ec-acrM_AsM1], pCDF{Placuv5}[alkL]{Ptac}[fadD_Ec-Maqu2220(co_Ec)] and pCDF{Placuv5}[alkL]{Ptac}[luxCDE_Pl(co_Ec)] with introduction of homologous regions to PspXI/NcoI-cut target vector pCDF[alkL] (SEQ ID No. 7).

[0332] The following oligonucleotides were employed here:

(SEQ ID No. 107)

| | |
|---|---|
| NP-FA-P17: | 5′-AATAAGGAGATATACGATAACAATTACGAGCTTCAT |
| | G-3′ |

(SEQ ID No. 108)

| | |
|---|---|
| NP-FA-P18: | 5′-GTTTCTTTACCAGACGCGTTCAAATTTCGCAGCA |
| | G-3′ |

[0333] The following parameters were employed for the PCR: 1×: initial denaturation, 98° C., 0:30 min; 35×: denaturation, 98° C., 0:15 min, annealing, 60° C., 0:45 min; elongation, 72° C., 1:30 min; 1×: terminal elongation, 72° C., 10 min. The Phusion™ High-Fidelity Master Mix from New England Biolabs (Frankfurt) was used for the amplification, following the manufacturer's recommendations. 50 μl of the PCR reactions in each case were then separated on a 1% strength TAE-agarose gel. The PCR, the agarose gel electrophoresis, ethidium bromide staining of the DNA and determination of the PCR fragment sizes were carried out in a manner known to those skilled in the art.

[0334] In all cases, PCR fragments of the expected size were able to be amplified. These were 2901 base pairs for P_{tac}-fadD_Ec-acr1a_AsADP1, 2877 base pairs for P_{tac}-fadD_Ec-acrM_AsM1, 3532 base pairs for P_{tac}-fadD_Ec-Maqu_{—}2220, 2907 base pairs for P_{tac}-fadD_Ec-acr1b_AsADP1, and 3810 base pairs for P_{tac}-luxCDE.

[0335] To isolate the DNA from the agarose gel, the target gel was cut out of the gel using a scalpel and purified using the QiaQuick Gel extraction kit according to the manufacturer's instructions (Qiagen, Hilden). The purified PCR products were cloned into the vector pCDF[alkL] (SEQ ID No. 7) digested with PspXI and NcoI by means of recombination, using the Geneart® Seamless Cloning and Assembly Kit according to the manufacturer's instructions (Life Technologies, Carlsbad, Calif., USA). Owing to the restriction of the vector, the alkL gene is removed therefrom. The transformation of chemically competent E. coli DH5α (New England Biolabs, Frankfurt) was performed in a manner known to those skilled in the art. The correct insertion of the target genes was checked by restriction analysis and the authenticity of the introduced genes was verified by DNA sequencing.

[0336] The expression vectors hereinafter resulted in this manner:

(SEQ ID No. 109)
• pCDF{Ptac}[fadD_Ec-acr1b_AsADP1]
(SEQ ID No. 110)
• pCDF{Ptac}[fadD_Ec-acr1a_AsADP1(co_Ec)]
(SEQ ID No. 111)
• pCDF{Ptac}[fadD_Ec-acrM_AsM1]
(SEQ ID No. 112)
• pCDF{Ptac}[fadD_Ec-Maqu2220(co_Ec)]
(SEQ ID No. 113)
• pCDF{Ptac}[luxCDE_Pl(co_Ec)]

### Example 18

### Chromatographic Quantification of Fatty Alcohols and Fatty Aldehydes

[0337] Fatty alcohols and fatty aldehydes are quantified by gas chromatography with mass-spectrometric coupling (GC/MS).

[0338] To extract the samples consisting of 1 ml of culture broth they are admixed with 500 μl of ethyl acetate (Chromasolv®Plus 99.9%, Sigma No. 650528-1L), shaken for 10 min at 12 Hz and sedimented for 5 min at 13 200 rpm in a bench centrifuge (Eppendorf, Hamburg). The organic phase (ethyl acetate) is transferred to HPLC vials with an insert and analysed for fatty alcohols and fatty aldehydes of differing chain length (C8-C18) by GC/MS coupling.

[0339] To separate fatty alcohols and fatty aldehydes, the ZB-50 capillary column having the dimensions 30 m×320 μm and a film thickness of 0.5 μm (Phenomenex, Aschaffenburg) is used as stationary phase. The carrier gas used is helium at a constant flow rate of 1.5 ml/min. The separation proceeds in the course of 45 min at an injection temperature of 250° C. and a detector temperature of 250° C. The column temperature at the start is 40° C. and is held for 2 min. Thereafter the column temperature is increased at 7° C./min to 150° C., then at 15° C./min to 320° C. and held for 10 min. The injection volume is 1 μl splitless. Detection is performed by means of MS (DSQ II) detector (Thermo Fisher Scientific) with a mass range of 12-800 m/z. The reference substance employed is a standard mixture consisting of in each case 10 μg/ml 1-octanal (99%, Sigma-Aldrich), 1-octanol (Sigma-Aldrich), 1-decanal (>98%, Sigma-Aldrich), 1-decanol (>99%, Sigma-Aldrich), 1-dodecanal (>92%, Sigma-Aldrich), 1-dodecanol (>98%, Sigma-Aldrich), 1-tetradecanal, 1-tetradecanol (>99%, Fluka), 1-hexadecanal and 1-hexadecanol (99%, Sigma-Aldrich) for calibration. Relative quantification of the samples is performed via the peak areas.

### Example 19

### Production of Fatty Alcohols by E. coli Strains Having a Deletion in the fadE Gene which Overexpresses the alkL Genes from Pseudomonas putida GPo1 and fatB2 from Cuphea hookeriana or fatB3 from Cocos nucifera and the fadD Gene from Escherichia coli and an Acyl-ACP Reductase Gene

[0340] To generate E. coli strains having the expression vector for the alkL gene from Pseudomonas putida GPo1 and the fadD gene from E. coli, and the genes acr1a from Acinetobacter sp. ADP1 or acr1b from Acinetobacter sp. ADP1 or acrM from Acinetobacter sp. M-1 or Maqu2220 from Marinobacterium aquaeolei VT8 or luxCDE from Photorhabdus luminescens in combination with the expression vector for the fatB2 gene from Cuphea hookeriana and/or fatB3 from Cocos nucifera, electrocompetent cells of E. coli W3110 ΔfadE and E. coli JW5020-1 Kan^{S} were prepared. This took place in a manner known to those skilled in the art. E. coli JW5020-1 Kan^{S} is a derivative of E. coli JW5020-1 (CGSC, The coli genetic stock center, Yale University, New Haven, USA), this in turn is a E. coli BW25113 derivative which bears a deletion of the fadE gene. The fadE gene was replaced by a kanamycin cassette. This was removed in a manner known to those skilled in the art before the strain was equipped with the expression vectors using a helper plasmid which encodes fip recombinase (see Datsenko K. A. and Wanner B. L. (2000) PNAS 97(12):6640-6645) resulting in strain E. coli JW5020-1 Kan^{S}. E. coli JW5020-1

[0341] Kan^{S} was transformed with the plasmids pJ294[Ptac-ChFATB2_optEc] (SEQ ID No. 10) in combination with pCDF{Ptac}[fadD_Ec-acr1a_AsADP1(co_Ec)] (SEQ ID No. 110), pCDF{Placuv5}[alkL]{Ptac}[fadD_Ec-acr1a_AsADP1(co_Ec)] (SEQ ID No. 103), pCDF{Ptac}[fadD_Ec-Maqu2220(co_Ec)] (SEQ ID No. 112) or pCDF{Placuv5}[alkL]{Ptac}[fadD_Ec-Maqu2220(co_Ec)] (SEQ ID No. 105) and E. coli W3110 ΔfadE with the plasmids pJ294{Ptac}[CnFATB3(co_Ec)] (SEQ ID No. 40) in combination with pCDF{Ptac}[fadD_Ec-acr1b_AsADP1] (SEQ ID No. 109), pCDF{Placuv5}[alkL]{Ptac}[fadD_Ec-acr1b_AsADP1] (SEQ ID No. 102), pCDF{Ptac}[fadD_Ec-acrM_AsM1] (SEQ ID No. 111), pCDF{Placuv5}[alkL]{Ptac}[fadD_Ec-acrM_AsM1] (SEQ ID No. 104), pCDF{Ptac}[luxCDE_Pl(co_Ec)] (SEQ ID No. 113) or pCDF{Placuv5}[alkL]{Ptac}[luxCDE_Pl(co_Ec)] (SEQ ID No. 106) and plated out on LB-agar plates containing spectinomycin (100 μg/ml) and ampicillin (100 μg/ml). Transformants were checked for the presence of the correct plasmids by plasmid preparation and analytical restriction analysis.

[0342] In this manner the E. coli strains hereinafter were generated:
[0343] E. coli JW5020-1 Kan^{S} pJ294[Ptac-ChFATB2_optEc]/pCDF{Ptac}[fadD_Ec-acr1a_AsADP1(co_Ec)]
[0344] E. coli JW5020-1 Kan^{S} pJ294[Ptac-ChFATB2_optEc]/pCDF{Placuv5}[alkL]{Ptac}[fadD_Ec-acr1a_AsADP1(co_Ec)]
[0345] E. coli JW5020-1 Kan^{S} pJ294[Ptac-ChFATB2_optEc]/pCDF{Ptac}[fadD_Ec-Maqu2220(co_Ec)]
[0346] E. coli JW5020-1 Kan^{S} pJ294[Ptac-ChFATB2_optEc]/pCDF{Placuv5}[alkL]{Ptac}[fadD_Ec-Maqu2220(co_Ec)]
[0347] E. coli W3110 ΔfadE pJ294{Ptac}[CnFATB3(co_Ec)]/pCDF{Ptac}[fadD_Ec-acrM_AsM1]
[0348] E. coli W3110 ΔfadE pJ294{Ptac}[CnFATB3(co_Ec)]/pCDF{Ptac}[alkL][fadD_Ec-acrM_AsM1]
[0349] E. coli W3110 ΔfadE pJ294{Ptac}[CnFATB3(co_Ec)]/pCDF{Ptac}[fadD_Ec-acr1b_AsADP1]
[0350] E. coli W3110 ΔfadE pJ294{Ptac}[CnFATB3(co_Ec)]/pCDF{Placuv5}[alkL]{Ptac}[fadD_Ec-acr1b_AsADP1]
[0351] E. coli W3110 ΔfadE pJ294{Ptac}[CnFATB3(co_Ec)]/pCDF{Ptac}[luxCDE_Pl(co_Ec)]
[0352] E. coli W3110 ΔfadE pJ294{Ptac}[CnFATB3(co_Ec)]/pCDF{Placuv5}[alkL]{Ptac}[luxCDE_Pl(co_Ec)]

[0353] These strains were used to study their ability to produce fatty alcohols. The following procedure was adopted here:

The strains are subjected to a multistage aerobic culturing process. The strains under investigation were first initially grown in Luria-Bertani Bouillon according to Miller (Merck, Darmstadt) containing 100 μg/ml of ampicillin and 100 μg/ml of spectinomycin as a 5 ml preliminary culture in each case from a single colony. The next culturing step proceeded in M9 medium. The medium consisting of 38 mM disodium hydrogenphosphate dihydrate, 22 mM potassium dihydrogenphosphate, 8.6 mM sodium chloride, 37 mM ammonium chloride, 2% (w/v) glucose, 2 mM magnesium sulphate heptahydrate (all substances from Merck, Darmstadt) and 0.1% (v/v) trace element solution were adjusted to a pH of 7.4 with 25% strength ammonium hydroxide solution. The added trace element solution consisting of 9.7 mM manganese(II) chloride tetrahydrate, 6.5 mM zinc sulphate heptahydrate, 2.5 mM sodium EDTA (Titriplex III), 4.9 mM boric acid, 1 mM sodium molybdate dihydrate, 32 mM calcium chloride dihydrate, 64 mM iron(II) sulphate heptahydrate and 0.9 mM copper(II) chloride dihydrate dissolved in 1 M hydrochloric acid (all substances from Merck, Darmstadt) was sterile-filtered before addition to the M9 medium. 10 ml of M9 medium were charged into a 100 ml conical flask with chicane with 100 μg/ml of spectinomycin and 100 μg/ml of ampicillin and inoculated with 0.5 ml from the preliminary culture. The culturing proceeded at 37° C. and 200 rpm in an incubating shaker. After a culturing time of 8 hours, 50 ml of M9 medium containing 100 μg/ml of spectinomycin and 100 μg/ml of ampicillin were charged into a 250 ml conical flask with chicane and inoculated with the 10 ml culture, in such a manner that an optical density (600 nm) of 0.2 is achieved. Culturing proceeded at 37° C. and 200 rpm in an incubating shaker. When an optical density (600 nm) of 0.6 to 0.8 is achieved, the gene expression is induced by adding 1 mM IPTG. The strains were cultured for a further 24 hours at 30° C. and 200 rpm. During culturing, samples are withdrawn and the concentration of fatty alcohols of differing carbon chain lengths is quantified as described in Example 18. The results are shown in the table hereinafter.

[0354] Production of fatty alcohols using E. coli JW5020-1 Kan^{S} and E. coli W3110 ΔfadE which overexpress a plant acyl-ACP thioesterase, fadD from E. coli and also a fatty acyl-CoA reductase. Strains with and without overexpression of alkL from P. putida GPo1 are shown. The concentrations of fatty alcohols of differing carbon chain length are reported after culturing for 24 hours (n.d.=not detectable):

| | Decanol | Dodecanol | Tetradecanol | Hexadecanol |
|---|---|---|---|---|
| | [Peak area/OD] | [Peak area/OD] | [Peak area/OD] | [Peak area/OD] |
| E. coli W3110 ΔfadE pJ294{Ptac}[CnFATB3(co_Ec)]/ | n.d. | 2.53E+06 | 9.74E+06 | 1.39E+07 |
| pCDF{Ptac}[fadD_Ec-acrM_AsM1(co_Ec)] | | | | |
| E. coli W3110 ΔfadE pJ294{Ptac}[CnFATB3(co_Ec)]/ | n.d. | 1.15E+07 | 2.90E+07 | 3.01E+07 |
| pCDF{Placuv5}[alkL]{Ptac}[fadD_Ec- | | | | |
| acrM_AsM1(co_Ec)] | | | | |
| E. coli W3110 ΔfadE pJ294{Ptac}[CnFATB3(co_Ec)]/ | n.d. | 1.42E+06 | 6.91E+06 | n.d. |
| pCDF{Ptac}[luxCDE_PI(co_Ec)] | | | | |
| E. coli W3110 ΔfadE pJ294{Ptac}[CnFATB3(co_Ec)]/ | n.d. | 3.78E+06 | 1.77E+07 | n.d. |
| pCDF{Placuv5}[alkL]{Ptac}[luxCDE_PI(co_Ec)] | | | | |
| E. coli W3110 ΔfadE pJ294{Ptac}[CnFATB3(co_Ec)]/ | n.d. | 2.43E+04 | 1.59E+06 | n.d. |
| pCDF{Ptac}[fadD_Ec-acr1b_AsADP1)] | | | | |
| E. coli W3110 ΔfadE pJ294{Ptac}[CnFATB3(co_Ec)]/ | n.d. | 8.65E+05 | 2.44E+06 | n.d. |
| pCDF{Placuv5}[alkL]{Ptac}[fadD_Ec-acr1b_AsADP1)] | | | | |
| E. coli JW5020-1 Kan^{S} pJ294{Ptac}[Ptac- | 4.65E+06 | n.d. | 3.49E+06 | 5.63E+06 |
| ChFATB2_optEc]/pCDF{Ptac}[fadD_Ec- | | | | |
| acr1a_AsADP1(co_Ec)] | | | | |
| E. coli JW5020-1 Kan^{S} pJ294[Ptac-ChFATB2_optEc]/ | 1.61E+07 | n.d. | 4.23E+07 | 3.45E+07 |
| pCDF{Placuv5}[alkL]{Ptac}[fadD_Ec- | | | | |
| acr1a_AsADP1(co_Ec)] | | | | |
| E. coli JW5020-1 Kan^{S} pJ294[Ptac-ChFATB2_optEc]/ | n.d. | n.d. | 5.66E+04. | 7.12E+04 |
| pCDF{Ptac}[fadD_Ec-Maqu2220_Ma(co_Ec)] | | | | |
| E. coli JW5020-1 Kan^{S} pJ294[Ptac-ChFATB2_optEc]/ | n.d. | n.d. | 6.74E+07 | 2.48E+08 |
| pCDF{Placuv5}[alkL]{Ptac}[fadD_Ec- | | | | |
| Maqu2220_Ma(co_Ec)] | | | | |

[0355] It was thus shown that strains which overexpress alkL from P. putida are able to form more decanol, dodecanol, tetradecanol and hexadecanol than strains without alkL. This shows that reinforcement of alkL is necessary for producing fatty alcohols of various chain lengths from unrelated carbon sources.

### Example 20

### Preparation of an Expression Vector for the Mmar_{—}3356 Gene from Mycobacterium marinum

[0356] To produce an expression vector for the Mmar_{—}3356 gene (SEQ ID No. 114) from Mycobacterium marinum, the gene was codon-optimized for expression in E. coli. The synthesized gene for the SAM-dependent methyltransferase (Eᵥₐ) was amplified with introduction of an NdeI cleavage site upstream and an XbaI cleavage site downstream. The restriction cleavage sites were introduced via the oligonucleotides used.

(SEQ ID No.119)

| | |
|---|---|
| mt_fw_Ndel: | 5′-TATATACATATGCCAAGAGAGATTAGATTACC-3′ |

(SEQ ID No. 120)

| | |
|---|---|
| mt_rv_Xbal: | 5′-TATATATCTAGACTGAGTTAGGCACGTTTCG-3′ |

[0357] The following parameters were used for the PCR: 1×: initial denaturation, 98° C., 0:30 min; 35×: denaturation, 98° C., 0:10 min, annealing, 62° C., 0:20 min; elongation, 72° C., 0:30 min; 1×: terminal elongation, 72° C., 10 min. The Phusion™ High-Fidelity Master Mix from New England Biolabs (Frankfurt) was used for the amplification in accordance with the manufacturer's recommendations. 50 μl of the PCR reactions were then separated in each case on a 1.5% strength TAE-agarose gel. The PCR, the agarose gel electrophoresis, ethidium bromide staining of the DNA and determination of the PCR fragment sizes were carried out in a manner known to those skilled in the art.

[0358] The PCR fragment having the expected size of 1133 base pairs was able to be amplified. To isolate the DNA from the agarose gel, the target DNA was cut out of the gel using a scalpel and purified using the QiaQuick Gel extraction kit in accordance with the manufacturer's instructions (Qiagen, Hilden). The purified PCR product was digested using the restriction endonucleases NdeI and XbaI and was ligated into an appropriately cut pJ281 derivative (SEQ ID No. 121) which contains a lacuv5 promotor. The transformation of chemically competent E. coli DH5α (New England Biolabs, Frankfurt) proceeded according to a manner known to those skilled in the art. Correct insertion of the target genes was checked by restriction analysis and the authenticity of the introduced genes was validated by DNA sequencing. The completed E. coli expression vector was termed pJ281{Placuv5}[Mmar_{—}3356(co_Ec)] (SEQ ID No. 116).

### Example 21

### Production of Fatty Acid Esters by E. coli Strains with a Deletion in the fadE Gene which Overexpress a Plant Acyl-ACP Thioesterase Gene, the alkL Genes from Pseudomonas putida GPo1 and Mmar_{—}3356 from Mycobacterium marinum

[0359] To generate an E. coli strain having expression vectors for the genes fatB1 from Cuphea hookeriana, fatB2 from Cuphea hookeriana, fatB3 from Cocos nucifera or synUcTE from Umbellularia californica in combination with an expression vector for the Mmar_{—}3356 gene from Mycobacterium marinum and an expression vector for the alkL gene from Pseudomonas putida GPo1, electrocompetent cells of E. coli JW5020-1 Kan^{S} and E. coli W3110 ΔfadE are produced. This proceeded in a manner are known to those skilled in the art. The strains are transformed sequentially with the vectors pJ294[Ptac-ChFATB1_optEc] (SEQ ID No. 12), pJ294[Ptac-ChFATB2_optEc] (SEQ ID No. 10), pJ294{Ptac}[CnFATB3(co_Ec)] (SEQ ID No. 40) and/or pJ294[Ptac-synUcTE] (SEQ ID No. 41) and pJ281{Placuv5}[Mmar_{—}3356(co_Ec)] (SEQ ID No. 116) and pCDF[alkL] (SEQ ID No. 7) and/or pCDFDuet-1 (71340-3, Merck, Darmstadt) and plated onto LB-agar plates containing ampicillin (100 μg/ml), kanamycin (50 μg/ml) and spectinomycin (100 μg/ml). Transformants are checked by plasmid preparation and analytical restriction analysis with respect to the presence of the correct plasmids. In this manner the strains hereinafter were constructed:
[0360] E. coli JW5020-1 Kan^{S} pJ294[Ptac-ChFATB1_optEc]/pJ281{Placuv5}[Mmar_{—}3356(co_Ec)]/pCDF[alkL]
[0361] E. coli JW5020-1 Kan^{S} pJ294[Ptac-ChFATB1_optEc]/pJ281{Placuv5}[Mmar_{—}3356(co_Ec)]/pCDFDuet-1
[0362] E. coli JW5020-1 Kan^{S} pJ294[Ptac-ChFATB2_optEc]/pJ281{Placuv5}[Mmar_{—}3356(co_Ec)]/pCDF[alkL]
[0363] E. coli JW5020-1 Kan^{S} pJ294[Ptac-ChFATB2_optEc]/pJ281{Placuv5}[Mmar_{—}3356(co_Ec)]/pCDFDuet-1
[0364] E. coli JW5020-1 Kan^{S} pJ294{Ptac}[CnFATB3(co_Ec)]/pJ281{Placuv5}[Mmar_{—}3356(co_Ec)]/pCDF[alkL]
[0365] E. coli JW5020-1 Kan^{S} pJ294{Ptac}[CnFATB3(co_Ec)]/pJ281{Placuv5}[Mmar_{—}3356(co_Ec)]/pCDFDuet-1
[0366] E. coli W3110 ΔfadE pJ294[Ptac-synUcTE]/pJ281{Placuv5}[Mmar_{—}3356(co_Ec)]/pCDF[alkL]
[0367] E. coli W3110 ΔfadE pJ294[Ptac-synUcTE]/pJ281{Placuv5}[Mmar_{—}3356(co_Ec)]/pCDFDuet-1

[0368] These strains are used to study their ability to produce fatty acid methyl esters from glucose. The following procedure is adopted here:

The strains are subjected to a multistage aerobic culturing process. The strains under investigation are first initially grown in Luria-Bertani Bouillon according to Miller (Merck, Darmstadt) containing 50 μg/ml of kanamycin, 100 μg/ml of spectinomycin and 100 μg/ml of ampicillin as 5 ml preliminary culture from a single colony in each case. The next culture step proceeds in M9 medium. The medium, consisting of 38 mM disodium hydrogenphosphate dihydrate, 22 mM potassium dihydrogenphosphate, 8.6 mM sodium chloride, 37 mM ammonium chloride, 2% (w/v) glucose, 2 mM magnesium sulphate heptahydrate (all substances from Merck, Darmstadt) and 0.1% (v/v) trace element solution, is adjusted to a pH of 7.4 using 25% strength ammonium hydroxide solution. The added trace element solution consisting of 9.7 mM manganese(II) chloride tetrahydrate, 6.5 mM zinc sulphate heptahydrate, 2.5 mM sodium EDTA (Titriplex III), 4.9 mM boric acid, 1 mM sodium molybdate dihydrate, 32 mM calcium chloride dihydrate, 64 mM iron(II) sulphate heptahydrate and 0.9 mM copper(II) chloride dihydrate dissolved in 1 M hydrochloric acid (all substances from Merck, Darmstadt) is sterile-filtered before addition to the M9 medium. 10 ml of M9 medium are charged together with 50 μg/ml kanamycin, 100 μg/ml spectinomycin and 100 μg/ml ampicillin into a 100 ml conical flask with chicane and inoculated with 0.5 ml of the preliminary culture. The culturing proceeds at 37° C. and 200 rpm in an incubating shaker. After a culturing time of 8 hours, 50 ml of M9 medium containing 50 μg/ml of kanamycin, 100 μg/ml of spectinomycin and 100 μg/ml of ampicillin are charged in a 250 ml conical flask with chicane and inoculated with the 10 ml culture in such a manner that an optical density (600 nm) of 0.2 is achieved. The culturing proceeds at 37° C. and 200 rpm in an incubating shaker. When an optical density (600 nm) of 0.6 to 0.8 is reached, the gene expression is induced by adding 1 mM IPTG. The strains are cultured for at least a further 24 hours at 30° C. and 200 rpm. During the culturing, samples are withdrawn and the concentration of fatty acid methyl esters of differing carbon chain lengths is quantified as described in Example 15. It is shown that the strains E. coli JW5020-1 Kan^{S} pJ294[Ptac-ChFATB1_optEc]/pJ281{Placuv5}[Mmar_{—}3356(co_Ec)]/pCDF[alkL], E. coli JW5020-1 Kan^{S} pJ294[Ptac-ChFATB2_optEc]/pJ281{Placuv5}[Mmar_{—}3356(co_Ec)]/pCDF[alkL], E. coli JW5020-1 Kan^{S} pJ294{Ptac}[CnFATB3(co_Ec)]/pJ281{Placuv5}[Mmar_{—}3356(co_Ec)]/pCDF[alkL] and E. coli W3110 ΔfadE pJ294[Ptac-synUcTE]/pJ281{Placuv5}[Mmar_{—}3356(co_Ec)]/pCDF[alkL] are able, depending on the specificity of the overexpressed acyl-CoA thioesterase gene, to form fatty acid methyl esters of different carbon chain length and degree of saturation compared with the corresponding strains which do not overexpress the alkL gene. In particular, E. coli JW5020-1 Kan^{S} pJ294[Ptac-ChFATB1_optEc]/pJ281{Placuv5}[Mmar_{—}3356(co_Ec)]/pCDF[alkL] can produce more fatty acid methyl esters of chain length C14:0, C16:0 and C16:1, E. coli JW5020-1 Kan^{S} pJ294[Ptac-ChFATB2_optEc]/pJ281{Placuv5}[Mmar_{—}3356(co_Ec)]/pCDF[alkL] can produce more fatty acid methyl esters of chain length C8:0 and C10:0, E. coli JW5020-1 Kan^{S} pJ294{Ptac}[CnFATB3(co_Ec)]/pJ281{Placuv5}[Mmar_{—}3356(co_Ec)]/pCDF[alkL] can produce more fatty acid methyl esters of chain length C12:0, C14:0 and C16:1 and E. coli W3110 ΔfadE pJ294[Ptac-synUcTE]/pJ281{Placuv5}[Mmar_{—}3356(co_Ec)]/pCDF[alkL] can produce more fatty acid methyl esters of chain length C12:0 and C14:0 from glucose than the corresponding strains which lack the alkL gene from Pseudomonas putida GPo1.

### Example 22

### Preparation of an Expression Vector for the Coexpression of the Genes MSMEG_{—}2956 from Mycobacterium smegmatis, npt from Nocardia sp. with alkL from Pseudomonas putida

[0369] To prepare a E. coli expression vector for the genes MSMEG_{—}2956 (SEQ ID No. 117) from Mycobacterium smegmatis, npt (SEQ ID No: 122) from Nocardia sp. and alkL (SEQ ID No. 1) from Pseudomonas putida GPo1, the genes MSMEG_{—}2956 and npt are codon-optimized for expression in Escherichia coli and synthesized. The synthesized genes are cloned as an operon following a lacuv5 promoter using recombination cloning. MSMEG 2956 and npt are derivative with introduction of homologous regions for recombination cloning. The oligonucleotides hereinafter are used here:

Promoter region P_{lacuv5}:
(SEQ ID No. 126)

| | |
|---|---|
| NP-FA-P22: | 5′-CCGGTAGTCAATAAAATCGCACCTGGTGTTTAAAC |
| | G-3′ |

(SEQ ID No. 127)

| | |
|---|---|
| NP-FA-P23: | 5′-TGTCATATGCCACTCTCCTTGGTTCC-3′ |

MSMEG_2956(co_Ec) and npt_Noc(co_Ec):
(SEQ ID No. 128)

| | |
|---|---|
| NP-FA-P24: | 5′-GAGTGGCATATGACAATTGAAACGCGCGAAG-3′ |

(SEQ ID No. 129)

| | |
|---|---|
| NP-FA-P25: | 5′-TCTATTGCTGGTTTACCTAGGTTATCATTATCATG |
| | C-3′ |

[0370] The following parameters are used for the PCR: 1×: initial denaturation, 98° C., 0:30 min; 35×: denaturation, 98° C., 0:15 min, annealing, 60° C., 0:30 min; elongation, 72° C., 0:20 min; 1×: terminal elongation, 72° C., 10 min. The Phusion™ High-Fidelity Master Mix from New England Biolabs (Frankfurt) is used for the amplification in accordance with the manufacturer's recommendations. 50 μl of the PCR reactions in each case are then separated on a 1% strength TAE agarose gel and cut out from the agarose gel and purified. The PCR, agarose gel electrophoresis, ethidium bromide staining of the DNA and determination of the PCR fragment sizes and purification of the DNA fragments are carried out in a manner known to those skilled in the art. PCR fragments of 210 base pairs for the lacuv5 promoter region and 4241 base pairs for the DNA fragment MSMEG_{—}2956(co_Ec)-npt_Noc(co_Ec) are expected. The purified PCR fragments are cloned into the restriction endonuclease-Age/-digested vector pCDF[alkL] (SEQ ID No. 7) and pCDFDuet-1 (71340-3, Merck, Darmstadt) by means of recombination and using the Geneart® Seamless Cloning and Assembly Kit in accordance with the manufacturer's instructions (life Technologies, Carlsbad, Calif., USA). This generates the vectors pCDF[alkL][MSMEG_{—}2956(co_Ec)-npt_Noc(co_Ec)] (SEQ ID No. 124) and pCDF[MSMEG_{—}2956(co_Ec)-npt_Noc(co_Ec)] (SEQ ID No. 125). Chemically competent E. coli DH10β is transformed in a manner known to those skilled in the art. Correct insertion of the target genes is checked by restriction analysis and the authenticity of the insert is validated by DNA sequencing.

### Example 23

### Production of Fatty Aldehydes and Fatty Alcohols by E. coli Strains with a Deletion in the fadE Gene which Overexpress a Plant Acyl-ACP Thioesterase Gene, the Genes alkL from Pseudomonas putida GPo1 and MSMEG_{—}2956 from Mycobacterium smegmatis and npt from Nocardia sp

[0371] To generate E. coli strains having expression vectors for the genes fatB1 from Cuphea hookeriana, fatB2 from Cuphea hookeriana, fatB3 from Cocos nucifera or synUcTE from Umbellularia californica in combination with an expression vector for the genes MSMEG_{—}2956 from Mycobacterium smegmatis, npt from Nocardia sp. and alkL from Pseudomonas putida GPo1 electrocompetent cells of E. coli JW5020-1 Kan^{S} and E. coli W3110 ΔfadE are prepared. This is performed in a manner known to those skilled in the art. The strains are transformed with the vectors pJ294[Ptac-ChFATB1_optEc] (SEQ ID No. 12), pJ294[Ptac-ChFATB2_optEc] (SEQ ID No. 11), pJ294{Ptac}[CnFATB3(co_Ec)] (SEQ ID No. 40) and/or pJ294[Ptac-synUcTE] (SEQ ID No. 41) and pCDF[alkL][MSMEG_{—}2956(co_Ec)-npt_Noc(co_Ec)] (SEQ ID No. 124) and/or pCDF[MSMEG_{—}2956(co_Ec)-npt_Noc(co_Ec)] (SEQ ID No. 128) and plated onto LB-agar plates containing ampicillin (100 μg/ml) and spectinomycin (100 μg/ml). Transformants are checked with respect to the presence of the correct plasmids by plasmid preparation and analytical restriction analysis. The strains hereinafter are constructed in this manner:
[0372] E. coli JW5020-1 Kan^{S} pJ294[Ptac-ChFATB1_optEc]/pCDF[alkL][MSMEG_{—}2956(co_Ec)-npt_Noc(co_Ec)]
[0373] E. coli JW5020-1 Kan^{S} pJ294[Ptac-ChFATB1_optEc]/pCDF[MSMEG_{—}2956(co_Ec)-npt_Noc(co_Ec)]
[0374] E. coli JW5020-1 Kan^{S} pJ294[Ptac-ChFATB2_optEc]/pCDF[alkL][MSMEG_{—}2956(co_Ec)-npt_Noc(co_Ec)]
[0375] E. coli JW5020-1 Kan^{S} pJ294[Ptac-ChFATB2_optEc]/pCDF[MSMEG_{—}2956(co_Ec)-npt_Noc(co_Ec)]
[0376] E. coli JW5020-1 Kan^{S} pJ294{Ptac}[CnFATB3(co_Ec)]/pCDF[alkL][MSMEG_{—}2956(co_Ec)-npt_Noc(co_Ec)]
[0377] E. coli JW5020-1 Kan^{S} pJ294{Ptac}[CnFATB3(co_Ec)]/pCDF[MSMEG_{—}2956(co_Ec)-npt_Noc(co_Ec)]
[0378] E. coli W3110 ΔfadE pJ294{Ptac}[CnFATB3(co_Ec)]/pCDF[alkL][MSMEG_{—}2956(co_Ec)-npt_Noc(co_Ec)]
[0379] E. coli W3110 ΔfadE pJ294{Ptac}[CnFATB3(co_Ec)]/pCDF[MSMEG_{—}2956(co_Ec)-npt_Noc(co_Ec)]
[0380] E. coli W3110 ΔfadE pJ294[Ptac-synUcTE]/pCDF[alkL][MSMEG_{—}2956(co_Ec)-npt_Noc(co_Ec)]
[0381] E. coli W3110 ΔfadE pJ294[Ptac-synUcTE]/pCDF[MSMEG_{—}2956(co_Ec)-npt_Noc(co_Ec)]

[0382] These strains are employed to study their ability to produce fatty alcohols and fatty aldehydes from glucose. The following procedure is adopted here:

The strains are subjected to a multistage aerobic culturing process. The strains under investigation are initially grown in Luria-Bertani Bouillon according to Miller (Merck, Darmstadt) containing 100 μg/ml of ampicillin and 100 μg/ml of spectinomycin as a 5 ml preliminary culture from a single colony in each case. The next culturing step proceeds in M9 medium. The medium, consisting of 38 mM disodium hydrogenphosphate dihydrate, 22 mM potassium dihydrogenphosphate, 8.6 mM sodium chloride, 37 mM ammonium chloride, 2% (w/v) glucose, 2 mM magnesium sulphate heptahydrate (all substances from Merck, Darmstadt) and 0.1% (v/v) trace element solution, is adjusted to a pH of 7.4 using 25% strength ammonium hydroxide solution. The added trace element solution consisting of 9.7 mM manganese(II) chloride tetrahydrate, 6.5 mM zinc sulphate heptahydrate, 2.5 mM sodium EDTA (Titriplex III), 4.9 mM boric acid, 1 mM sodium molybdate dihydrate, 32 mM calcium chloride dihydrate, 64 mM iron(II) sulphate heptahydrate and 0.9 mM copper(II) chloride dihydrate dissolved in 1 M hydrochloric acid (all substances from Merck, Darmstadt) is sterile-filtered before addition to the M9 medium. 10 ml of M9 medium are charged with 100 μg/ml spectinomycin and 100 μg/ml ampicillin into 100 ml conical flasks with chicane and inoculated with 0.5 ml of the preliminary culture. The culturing proceeds at 37° C. and 200 rpm in an incubating shaker. After a culturing time of 8 hours, 50 ml of M9 medium are charged with 100 μg/ml of spectinomycin and 100 μg/ml of ampicillin in a 250 ml conical flask with chicane and inoculated with the 10 ml culture in such a manner that an optical density (600 nm) of 0.2 is achieved. The culturing proceeds at 37° C. and 200 rpm in an incubating shaker. When an optical density (600 nm) of 0.6 to 0.8 is achieved, the gene expression is induced by adding 1 mM IPTG. The strains are cultured for at least a further 24 hours at 30° C. and 200 rpm. During the culturing, samples are withdrawn and the concentration of fatty alcohols and fatty aldehydes of different carbon chain lengths is quantified as described in Example 18. It is shown that the strains E. coli JW5020-1 Kan^{S} pJ294[Ptac-ChFATB1_optEc]/pCDF[alkL][MSMEG_{—}2956(co_Ec)-npt_Noc(co_Ec)], E. coli JW5020-1 Kan^{S} pJ294[Ptac-ChFATB2_optEc]/pCDF[alkL][MSMEG_{—}2956(co_Ec)-npt_Noc(co_Ec)], E. coli JW5020-1 Kan^{S} pJ294{Ptac}[CnFATB3(co_Ec)]/pCDF[alkL][MSMEG_{—}2956(co_Ec)-npt_Noc(co_Ec)], E. coli W3110 ΔfadE pJ294{Ptac}[CnFATB3(co_Ec)]/pCDF[alkL][MSMEG_{—}2956(co_Ec)-npt_Noc(co_Ec)] and E. coli W3110 ΔfadE pJ294[Ptac-synUcTE]/pCDF[alkL][MSMEG_{—}2956(co_Ec)-npt_Noc(co_Ec)] are able, depending on the specificity of the overexpressed acyl-CoA thioesterase gene, to form fatty alcohols and fatty aldehydes of differing carbon chain length and differing degree of saturation compared to the corresponding strains which do not overexpress the gene alkL. In particular, E. coli JW5020-1 Kan^{S} pJ294[Ptac-ChFATB1_optEc]/pCDF[alkL][MSMEG_{—}2956(co_Ec)-npt_Noc(co_Ec)] can produce from glucose more fatty alcohols and fatty aldehydes of chain length C14:0, C16:0 and C16:1, E. coli JW5020-1 Kan^{S} pJ294[Ptac-ChFATB2_optEc]/pCDF[alkL][MSMEG_{—}2956(co_Ec)-npt_Noc(co_Ec)] can produce from glucose more fatty alcohols and fatty aldehydes of chain length C8:0 and C10:0, E. coli JW5020-1 Kan^{S} pJ294{Ptac}[CnFATB3(co_Ec)]/pCDF[alkL][MSMEG_{—}2956(co_Ec)-npt_Noc(co_Ec)] can produce from glucose more fatty alcohols and fatty aldehydes of chain length C12:0, C14:0 and C16:1, E. coli W3110 ΔfadE pJ294{Ptac}[CnFATB3(co_Ec)]/pCDF[alkL][MSMEG_{—}2956(co_Ec)-npt_Noc(co_Ec)] can produce from glucose more fatty alcohols and fatty aldehydes of chain length C12:0, C14:0 and C16:1 and E. coli W3110 ΔfadE pJ294[Ptac-synUcTE]/pCDF[alkL][MSMEG_{—}2956(co_Ec)-npt_Noc(co_Ec)] can produce from glucose more fatty alcohols and fatty aldehydes of chain length C12:0 and C14:0, than the corresponding strains which lack the gene alkL from Pseudomonas putida GPo1.

### Example 24

### Preparation of Expression Vectors for the Coexpression of an Acyl-ACP Thioesterase Gene, Ald from Bacillus subtilis and Cv 2025 from Chromobacterium violaceum

[0383] To produce E. coli expression vectors for the genes fatB1 (SEQ ID No. 9) from Cuphea hookeriana, fatB2 (SEQ ID No. 8) from Cuphea hookeriana and synUcTE (SEQ ID No. 37) from Umbellularia californica (in each case encoding an enzyme Eᵢ) and ald (SEQ ID No. 130) from Bacillus subtilis (encoding an enzyme Eₓᵢᵥ) and Cv_{—}2025 (SEQ ID No. 132) from Chromobacterium violaceum (encoding an enzyme Eₓᵢᵢᵢ), the genes fatB1, fatB2 and synUcTE are codon-optimized for expression in Escherichia coli and synthesized together with a tac promotor (SEQ ID No. 39). During the synthesis, a cleavage site is introduced upstream of the promoter and a cleavage site is introduced downstream of the terminator. The synthesized DNA fragments are digested with the restriction endonucleases BamHI and NotI and ligated into the correspondingly cut vector pJ294_alaDH_B.s._TA_C.v.(Ct) (SEQ ID No. 121). The expression vector used here has already been described in German patent application DE102011110946 and recorded there under SEQ ID No. 17. The completed vectors are named pJ294[alaDH_B.s._TA_C.v.(Ct)_Ptac-ChFATB1_optEc] (SEQ ID No. 134), pJ294[alaDH_B.s._TA_C.v.(Ct)_Ptac-ChFATB2_optEc] (SEQ ID No. 135) and pJ294[alaDH_B.s._TA_C.v.(Ct)_Ptac-synUcTE] (SEQ ID No. 136).

### Example 25

### Production of Alkylamines by E. coli Strains Having a Deletion in the fadE Gene which Overexpress an Acyl-CoA Thioesterase Gene, the Genes Cv_{—}2025 from Chromobacterium violaceum and ald from Bacillus subtilis, alkL from Pseudomonas putida GPo1, carA from Mycobacterium smegmatis and npt from Nocardia sp

[0384] To generate E. coli strains having expression vectors for the genes ald from Bacillus subtilis, Cv_{—}2025 from Chromobacterium violaceum and fatB1 from Cuphea hookeriana, fatB2 from Cuphea hookeriana, synUcTE from Umbellularia californica in combination with an expression vector for the genes MSMEG_{—}2956 from Mycobacterium smegmatis, npt from Nocardia sp. and alkL from Pseudomonas putida GPo1, electrocompetent cells of E. coli JW5020-1 Kan^{S} and E. coli W3110 ΔfadE are prepared. This takes place in a manner known to those skilled in the art. The strains are transformed with the vectors pJ294[alaDH_B.s._TA_C.v.(Ct)_Ptac-ChFATB1_optEc] (SEQ ID No. 134), pJ294[alaDH_B.s._TA_C.v.(Ct)_Ptac-ChFATB2_optEc](SEQ ID No. 135) and/or pJ294[alaDH_B.s._TA_C.v.(Ct)_Ptac-synUcTE] (SEQ ID No. 136) in combination with pCDF[alkL][MSMEG_{—}2956(co_Ec)-npt_Noc(co_Ec)] (SEQ ID No. 124) and/or pCDF[MSMEG_{—}2956(co_Ec)-npt_Noc(co_Ec)] (SEQ ID No. 125) and plated onto LB-agar plates containing ampicillin (100 μg/ml) and spectinomycin (100 μg/ml). Transformants are checked with regard to the presence of the correct plasmids via plasmid preparation and analytical restriction analysis. The strains hereinafter are constructed in this manner:
[0385] E. coli JW5020-1 Kan^{S} pJ294[alaDH_B.s._TA_C.v.(Ct)_Ptac-ChFATB1_optEc]/pCDF[alkL][MSMEG_{—}2956(co_Ec)-npt_Noc(co_Ec)]
[0386] E. coli JW5020-1 Kan^{S} pJ294[alaDH_B.s._TA_C.v.(Ct)_Ptac-ChFATB1_optEc]/pCDF[MSMEG_{—}2956(co_Ec)-npt_Noc(co_Ec)]
[0387] E. coli JW5020-1 Kan^{S} pJ294[alaDH_B.s._TA_C.v.(Ct)_Ptac-ChFATB2_optEc]/pCDF[alkL][MSMEG_{—}2956(co_Ec)-npt_Noc(co_Ec)]
[0388] E. coli JW5020-1 Kan^{S} pJ294[alaDH_B.s._TA_C.v.(Ct)_Ptac-ChFATB2_optEc]/pCDF[MSMEG_{—}2956(co_Ec)-npt_Noc(co_Ec)]
[0389] E. coli W3110 ΔfadE pJ294[alaDH_B.s._TA_C.v.(Ct)_Ptac-synUcTE]/pCDF[alkL][MSMEG_{—}2956(co_Ec)-npt_Noc(co_Ec)]
[0390] E. coli W3110 ΔfadE pJ294[alaDH_B.s._TA_C.v.(Ct)_Ptac-synUcTE]/pCDF[MSMEG_{—}2956(co_Ec)-npt_Noc(co_Ec)]

[0391] These strains are employed to study their ability to produce alkylamines and glucose. The following procedure is adopted here:

The strains are subjected to a multistage aerobic culturing process. The strains under investigation are initially grown in Luria-Bertani Bouillon according to Miller (Merck, Darmstadt) containing 100 μg/ml of ampicillin and 100 μg/ml of spectinomycin as 5 ml preliminary culture each from an individual colony. The next culturing step proceeds in M9 medium. The medium consisting of 38 mM disodium hydrogenphosphate dihydrate, 22 mM potassium dihydrogenphosphate, 8.6 mM sodium chloride, 37 mM ammonium chloride, 2% (w/v) glucose, 2 mM magnesium sulphate heptahydrate (all substances from Merck, Darmstadt) and 0.1% (v/v) trace element solution is adjusted to a pH of 7.4 using 25% strength ammonium hydroxide solution. The added trace element solution consisting of 9.7 mM manganese(II) chloride tetrahydrate, 6.5 mM zinc sulphate heptahydrate, 2.5 mM sodium EDTA (Titriplex III), 4.9 mM boric acid, 1 mM sodium molybdate dihydrate, 32 mM calcium chloride dihydrate, 64 mM iron(II) sulphate heptahydrate and 0.9 mM copper(II) chloride dihydrate dissolved in 1 M hydrochloric acid (all substances from Merck, Darmstadt) is sterile-filtered before addition to the M9 medium. 10 ml of M9 medium are charged with 100 μg/ml of spectinomycin and 100 μg/ml of ampicillin in 100 ml conical flask with chicane and inoculated with 0.5 ml of the preliminary culture. Culturing proceeds at 37° C. and 200 rpm in an incubating shaker. After a culturing time of 8 hours, 50 ml of M9 medium containing 100 μg/ml of spectinomycin and 100 μg/ml of ampicillin are charged in a 250 ml conical flask with chicane and inoculated with the 10 ml culture, in such a manner that an optical density (600 nm) of 0.2 is achieved. The culturing proceeds at 37° C. and 200 rpm in an incubating shaker. When an optical density (600 nm) of 0.6 to 0.8 is achieved, the gene expression is induced by addition of 1 mM IPTG. The strains are cultured for at least a further 24 hours at 30° C. and 200 rpm. During the culturing, samples are withdrawn and the concentration of fatty aldehydes of differing carbon chain lengths is quantified. It is shown that the strains E. coli JW5020-1 Kan^{S} pJ294[alaDH_B.s._TA_C.v.(Ct)_Ptac-ChFATB1_optEc]/pCDF[alkL][MSMEG_{—}2956(co_Ec)-npt_Noc(co_Ec)], E. coli JW5020-1 Kan^{S} pJ294[alaDH_B.s._TA_C.v.(Ct)_Ptac-ChFATB2_optEc]/pCDF[alkL][MSMEG_{—}2956(co_Ec)-npt_Noc(co_Ec)] and E. coli W3110 ΔfadE pJ294[alaDH_B.s._TA_C.v.(Ct)_Ptac-synUcTE]/pCDF[alkL][MSMEG_{—}2956(co_Ec)-npt_Noc(co_Ec)] are able, depending on the specificity of the overexpressed alkyl-CoA thioesterase gene, to form alkylamines of differing carbon chain length and differing degree of saturation in comparison with the corresponding strains which do not overexpress the alkL gene. In particular, E. coli JW5020-1 Kan^{S} pJ294[alaDH_B.s._TA_C.v.(Ct)_Ptac-ChFATB1_optEc]/pCDF[alkL][MSMEG_{—}2956(co_Ec)-npt_Noc(co_Ec)] can produce from glucose more alkylamines of chain length C14:0, C16:0 and C16:1, E. coli JW5020-1 Kan^{S} pJ294[alaDH_B.s._TA_C.v.(Ct)_Ptac-ChFATB2_optEc]/pCDF[alkL][MSMEG_{—}2956(co_Ec)-npt_Noc(co_Ec)] can produce from glucose more alkylamines of chain length C8:0 and C10:0 and E. coli W3110 ΔfadE pJ294[alaDH_B.s._TA_C.v.(Ct)_Ptac-synUcTE]/pCDF[alkL][MSMEG_{—}2956(co_Ec)-npt_Noc(co_Ec)] can produce from glucose more alkylamines of chain length C12:0 and C14:0 than the corresponding strains which lack the gene alkL from Pseudomonas putida GPo1.

### Example 26

### Preparation of E. coli Expression Vectors for the Expression of Various Acyl-CoA Reductases for Preparation of Fatty Alcohols and Fatty Aldehydes

[0392] The gene Maqu_{—}2220 (SEQ ID No. 137) from Marinobacter aquaeolei VT8 or Maqu_{—}2507 (SEQ ID No. 139) from Marinobacter aquaeolei VT8 or AtFAR6 (SEQ ID No. 141) from Arabidopsis thaliana or AcrM (SEQ ID No. 143) from Acinetobacter sp. M-1 or Acr1a (SEQ ID No. 145) from Acinetobacter sp. ADP1 or Acr1b (SEQ ID No. 147) from Acinetobacter sp. ADP1 (in each case encoding an enzyme Eₓ) was cloned into a pJ294 derivative (DNA2.0 Inc., Menlo Park, Calif., USA) following the P_{lac} promotor (SEQ ID No. 149) via the cleavage sites NdeI and NotI. The genes Maqu_{—}2220, Maqu_{—}2507, AtFAR6, AcrM and Acr1a are codon-optimized sequences for E-coli. The Acr1b gene is the wild type sequence. All codon-optimizations were carried out by DNA2.0 (DNA2.0 Inc., Menlo Park, Calif., USA). The DNA sequences were held in a vector specific to DNA2.0.

[0393] The genes Maqu_{—}2220, Maqu_{—}2507, AtFAR6 and AcrM were amplified using the polymerase chain reaction (PCR), while introducing the restriction cleavage sites NdeI (at the 5′ end of the respective gene) and NotI (at the 3′ end of the respective gene) as described hereinafter. The matrices used were the vectors from DNA2.0 (DNA2.0 Inc., Menlo Park, Calif., USA) pJ221[Maqu_{—}2220(co_ec)], pJ207[Maqu_{—}2507(co_Ec)], pJ201[AtFAR6(co_Ec)] and pJ221[AcrM(AsM1)].

[0394] The oliaonucleotides hereinafter were used in the PCR solutions:

| | | | Seq |
|---|---|---|---|
| | | | ID |
| Gene | Primer | Sequence (5′ => 3′) | NO. |
| Maqu_2220 | Pr-DesFA- | TATATACATATGGCAATTCAGCAGGT | 150 |
| | 1-FW | ACATCACG | |
| | Pr-DesFA- | TATATAGCGGCCGCTCATTACGCGGC | 151 |
| | 1-RV | CTTTTTGC | |
| Maqu_2507 | Pr-DesFA- | TATATACATATGAACTATTTTCTTAC | 152 |
| | 2-FW | AGGCGGTACAGG | |
| | Pr-DesFA- | TATATAGCGGCCGCTTATTACCAGTA | 153 |
| | 2-RV | AATACCACGCATAATTGC | |
| AtFAR6 | Pr-DesFA- | TATATACATATGGCGACGACGAATGT | 154 |
| | 3-FW | ACTGGC | |
| | Pr-DesFA- | TATATAGCGGCCGCTTATTACTCGGT | 155 |
| | 3-RV | TTTCTTCTTGCTCAGG | |
| AcrM | Pr-DesFA- | TATATACATATGAATGCAAAACTCAA | 156 |
| | 5-FW | AAAACTTTTTCAGC | |
| | Pr-DesFA- | TATATAGCGGCCGCTTATTACCAGTG | 157 |
| | 5-RV | TTCGCCTGGG | |

[0395] The following parameters were used for the PCRs: 1×: initial denaturation, 98° C., 0:30 min; 35 x: denaturation, 98° C., 0:30 min, annealing, 50° C. (Maqu_{—}2220) 160° C. (Maqu_{—}2507, AcrM, AtFAR6), 0:20 min; elongation, 72° C., 0:35 min; 1×: terminal elongation, 72° C., 5 min. The Phusion™ High-Fidelity Master Mix from New England Biolabs (Frankfurt) was used for the amplification in accordance with the manufacturer's recommendations. 50 μl of the PCR reactions in each case were then separated on a 1% strength agarose gel. The PCR, the agarose gel electrophoresis, ethidium bromide staining of the DNA and determination of the PCR fragment sizes was carried out in the manner known to those skilled in the art. The genes Acr1a and Acr1b from Acinetobacter sp. ADP1 were cloned via in-vitro cloning using the “GeneArt® Seamless Cloning and Assembly Kit” (Cat. No. A13288, Life Technologies GmbH, Darmstadt) in accordance with the manufacturer's instructions. For this purpose, both genes were amplified by PCR, while introducing homologous regions for recombination cloning. The matrices used were the DNA2.0 vector pJ221[Acr1a_AsADP1(co_Ec)] and the vector pCDF{Ptac}[fadD_Ec-acr1b_AsADP1] (SEQ ID No. 109).

[0396] The oligonucleotides hereinafter were used in the PCR solutions:

| Gene | Primer | Sequence (5′ => 3′) | Seq |
|---|---|---|---|
| | | | ID NO. |
| Acr1a | Pr-FA_4.1- | AACAGGAGGTAAAACATTGATCTC | 158 |
| | FW | GATCCGTGAAAAACGT | |
| | Pr-FA_4.1- | TGAAGTGGGGGCGGCCTTATCACC | 159 |
| | RV | AGTGCTCACCCGGGAA | |
| Acr1b | Pr- | AACAGGAGGTAAAACAGTGAACAA | 160 |
| | DesFA_4.2- | AAAACTTGAAGCTCTC | |
| | FW | | |
| | Pr- | TGAAGTGGGGGCGGCCTTATTACC | 161 |
| | DesFA_4.2- | AGTGTTCGCCTGGGAA | |
| | RV | | |

[0397] The following parameters were used for the PCRs: 1×: initial denaturation, 98° C., 0:30 min; 35×: denaturation, 98° C., 0:30 min, annealing, 64° C., 0:20 min; elongation, 72° C., 0:15 min; 1×: terminal elongation, 72° C., 5 min. The Phusion™ High-Fidelity Master Mix from New England Biolabs (Frankfurt) was used for the amplification in accordance with the manufacturer's recommendations. 50 μl of the PCR reactions in each case were then separated on a 1% strength agarose gel. The PCR, the agarose gel electrophoresis, ethidium bromide staining of the DNA and determination of the PCR fragment sizes were carried out in the manner known to those skilled in the art.

[0398] In all cases, PCR fragments of the expected size were able to be amplified. These were 1568 base pairs (bp) for Maqu_{—}2220, 2012 by for Maqu_{—}2507, 1673 by for AtFAR6, 914 by for AcrM, 947 by for Acr1a and 923 base pairs for Acr1b 923.

[0399] To isolate the DNA from an agarose gel, the target DNA was cut out of the gel using a scalpel and purified using the “Quick Gel Extraction Kit” from Qiagen (Hilden). The procedure was carried out according to the manufacturer's instructions.

[0400] In the next step, the PCR products of Maqu_{—}2220, Maqu_{—}2507, AtFAR6 and AcrM, just like the pJ294 derivate (DNA2.0 Inc., Menlo Park, Calif., USA), were cut using the restriction enzymes NdeI and NotI (New England Biolabs, Frankfurt) in accordance with the manufacturer's instructions. The cut vector was then applied to a 1% strength agarose gel. The agarose gel electrophoresis, ethidium bromide staining of the DNA and determination of the fragment sizes were carried out in the manner known to those skilled in the art. To isolate the DNA from an agarose gel, the target DNA was cut out from the gel using a scalpel and purified with the “Quick Gel Extraction Kit” from Qiagen (Hilden). The procedure was carried out according to the manufacturer's instructions. The NdeI-NotI-cut PCR amplificates Maqu_{—}2220, Maqu_{—}2507, AtFAR6 and AcrM were then ligated in each case with the NdeI-NotI-cut vector via the T4 DNA ligase (New England Biolabs, Frankfurt) in accordance with the manufacturer's instructions, obtaining the resultant vectors.

[0401] The PCR products of Acr1a and Acr1b from Acinetobacter sp. ADP1 were recombined together with the NdeII-NotI-cut pJ294 derivative using in-vitro cloning, using the “GeneArt® Seamless Cloning and Assembly Kit” (Cat. No. A13288, Life Technologies GmbH, Darmstadt), obtaining the resulting vectors. The use corresponded to the manufacturer's recommendations. The vector pJ294 is a E. coli expression vector which imparts an ampicillin resistance to the organism, and bears a p15A replication origin. Upstream of the cleavage site NdeI there is a P_{lac} promotor. The transformation of chemically competent E. coli DH5α cells (New England Biolabs, Frankfurt) proceeded in the manner known to those skilled in the art.

[0402] The correctness of the respective plasmid was controlled by restriction analysis using NruI. The authenticity of the inserted fragments was checked by DNA sequencing.

[0403] The completed E. coli expression vectors were named as follows:

| Vector name | Vector | Gene | SEQ ID No. |
|---|---|---|---|
| pHg-12-58 | pJ294 | Maqu_2220 | 162 |
| pHg-12-59 | pJ294 | Maqu_2507 | 163 |
| pHg-12-60 | pJ294 | AtFAR6 | 164 |
| pHg-12-61 | pJ294 | AcrM | 165 |
| pHg-12-62 | pJ294 | Acr1a | 166 |
| pHg-12-63 | pJ294 | Acr1b | 167 |

### Example 27

### Production of Fatty Alcohols and Fatty Aldehydes by E. coli Strains Having a Deletion in the fadE Gene and Expression Vectors for the Genes Maqu_{—}2220 from Marinobacter aquaeolei VT8, Maqu_{—}2507 from Marinobacter aquaeolei VT8, AtFAR6 from Arabidopsis thaliana, AcrM from Acinetobacter sp. M-1, Acr1 from Acinetobacter sp. ADP1 or Acr1 from Acinetobacter calcoaceticus in Combination with an Expression Vector for the alkL Gene from Pseudomonas putida

[0404] First, a E. coli W3110 strain having a deletion in the fadE gene is produced as described in Example 4.

[0405] To generate E. coli strains having the expression vector for the alkL gene from Pseudomonas putida GPo1 in combination with the expression vector for the Maqu_{—}2220 gene from Marinobacter aquaeolei VT8 or Maqu_{—}2507 from Marinobacter aquaeolei VT8 or AtFAR6 from Arabidopsis thaliana or AcrM from Acinetobacter sp. M-1 or Acr1 from Acinetobacter sp. ADP1 or Acr1 from Acinetobacter calcoaceticus, electrocompetent cells of E. coli W3110 ΔfadE and E. coli JW5020-1 Kan^{S} were prepared. This proceeds in a manner known to those skilled in the art. The host strain E. coli JW5020-1 Kan^{S} is a descendant of the E. coli JW5020-1 (CSGC, The coli genetic stock center, Yale University, New Haven, USA) and is a E. coli BW25113 derivative which carries a deletion of the fadE gene. The fadE gene was replaced by a kanamycin cassette. It was removed in a manner known to those skilled in the art (see Datsenko K. A. and Wanner B. L. (2000) PNAS 97(12):6640-6645) before the strain is equipped with the expression vectors using a helper plasmid which encodes the Hp recombinase, resulting in strain E. coli JW5020-1 Kan^{S}.

[0406] The competent cells were transformed with the plasmids pCDFDuet-1 or pCDF[alkL] in combination with pHg-12-58 or pHg-12-59 or pHg-12-60 or pHg-12-61 or pHg-12-62 or pHg-12-63 and plated out on LB plates containing spectinomycin (100 μg/ml) and ampicillin (100 μg/ml). Transformants were examined with respect to the presence of the correct plasmids via plasmid preparation and analytical restriction analysis.

[0407] In this manner the E. coli strains hereinafter were generated:
[0408] E. coli W3110 ΔfadE pCDF[alkL]/pHg-12-58
[0409] E. coli W3110 ΔfadE pCDF[alkL]/pHg-12-59
[0410] E. coli W3110 ΔfadE pCDF[alkL]/pHg-12-60
[0411] E. coli W3110 ΔfadE pCDF[alkL]/pHg-12-61
[0412] E. coli W3110 ΔfadE pCDF[alkL]/pHg-12-62
[0413] E. coli W3110 ΔfadE pCDF[alkL]/pHg-12-63
[0414] E. coli W3110 ΔfadE pCDFDuet-1/pHg-12-58
[0415] E. coli W3110 ΔfadE pCDFDuet-1/pHg-12-59
[0416] E. coli W3110 ΔfadE pCDFDuet-1/pHg-12-60
[0417] E. coli W3110 ΔfadE pCDFDuet-1/pHg-12-61
[0418] E. coli W3110 ΔfadE pCDFDuet-1/pHg-12-62
[0419] E. coli W3110 ΔfadE pCDFDuet-1/pHg-12-63
[0420] E. coli JW5020-1 Kan^{s} ΔfadE pCDF[alkL]/pHg-12-58
[0421] E. coli JW5020-1 Kan^{s} ΔfadE pCDF[alkL]/pHg-12-59
[0422] E. coli JW5020-1 Kan^{s} ΔfadE pCDF[alkL]/pHg-12-60
[0423] E. coli JW5020-1 Kan^{s} ΔfadE pCDF[alkL]/pHg-12-61
[0424] E. coli JW5020-1 Kan^{s} ΔfadE pCDF[alkL]/pHg-12-62
[0425] E. coli JW5020-1 Kan^{s} ΔfadE pCDF[alkL]/pHg-12-63
[0426] E. coli JW5020-1 Kan^{s} ΔfadE pCDFDuet-1/pHg-12-58
[0427] E. coli JW5020-1 Kan^{s} ΔfadE pCDFDuet-1/pHg-12-59
[0428] E. coli JW5020-1 Kan^{s} ΔfadE pCDFDuet-1/pHg-12-60
[0429] E. coli JW5020-1 Kan^{s} ΔfadE pCDFDuet-1/pHg-12-61
[0430] E. coli JW5020-1 Kan^{s} ΔfadE pCDFDuet-1/pHg-12-62
[0431] E. coil JW5020-1 Kan^{s} ΔfadE pCDFDuet-1/pHg-12-63

[0432] These strains are employed to investigate their ability to produce fatty alcohols and fatty aldehydes from glucose. The following procedure is followed here:

The strains are subjected to a multistage aerobic culturing process. The strains under examination are initially grown in Luria-Bertani Bouillon according to Miller (Merck, Darmstadt) as a 5 ml preliminary culture from an individual colony in each case. The next culturing step proceeds in M9 medium. The medium consisting of 38 mM disodium hydrogenphosphate dihydrate, 22 mM potassium dihydrogenphosphate, 8.6 mM sodium chloride, 37 mM ammonium chloride, 2% (w/v) glucose, 2 mM magnesium sulphate heptahydrate (all substances from Merck, Darmstadt) and 0.1% (v/v) trace element solution is adjusted to a pH of 7.4 using 25% strength ammonium hydroxide solution. The added trace element solution consisting of 9.7 mM manganese(II) chloride tetrahydrate, 6.5 mM zinc sulphate heptahydrate, 2.5 mM sodium EDTA (Titriplex III), 4.9 mM boric acid, 1 mM sodium molybdate dihydrate, 32 mM calcium chloride dihydrate, 64 mM iron(II) sulphate heptahydrate and 0.9 mM copper(II) chloride dihydrate dissolved in 1 M hydrochloric acid (all substances from Merck, Darmstadt) is sterile-filtered before addition to the M9 medium. 10 ml of M9 medium are charged with 100 μg/ml of spectinomycin and 100 μg/ml of ampicillin into 100 ml conical flasks with chicane and inoculated with 0.5 ml of the preliminary culture. The culturing proceeds at 37° C. and 200 rpm in an incubating shaker. After a culturing time of 8 hours, 50 ml of M9 medium containing 100 μg/ml of spectinomycin and 100 μg/ml of ampicillin are charged in a 250 ml conical flask with chicane and inoculated with the 10 ml culture in such a manner that an optical density (600 nm) of 0.2 is achieved. The culturing proceeds at 37° C. and 200 rpm in an incubating shaker. When an optical density (600 nm) of 0.6 to 0.8 is achieved, the gene expression is induced by adding 1 mM of IPTG. The strains are cultured for a further 48 hours at 30° C. and 200 rpm in an incubating shaker. During the culturing, samples of 1 ml are withdrawn and the concentration of fatty alcohols and fatty aldehydes of differing carbon chain lengths is quantified using the method described in Example 18. It is shown that the strains E. coli W3110 ΔfadE pCDF[alkL]/pHg-12-58, E. coli W3110 ΔfadE pCDF[alkL]/pHg-12-59, E. coli W3110 ΔfadE pCDF[alkL]/pHg-12-60, E. coli W3110 ΔfadE pCDF[alkL]/pHg-12-61, E. coli W3110 ΔfadE pCDF[alkL]/pHg-12-62, E. coli W3110 ΔfadE pCDF[alkL]/pHg-12-63 and the strains E. coli JW5020-1 Kan^{s} ΔfadE pCDF[alkL]/pHg-12-58, E. coli JW5020-1 Kan^{s} ΔfadE pCDF[alkL]/pHg-12-59, E. coli JW5020-1 Kan^{s} ΔfadE pCDF[alkL]/pHg-12-60, E. coli JW5020-1 Kan^{s} ΔfadE pCDF[alkL]/pHg-12-61, E. coli JW5020-1 Kan^{s} ΔfadE pCDF[alkL]/pHg-12-62 and E. coli JW5020-1 Kan^{s} ΔfadE pCDF[alkL]/pHg-12-63 can produce a higher titre of fatty alcohols and fatty aldehydes of differing chain length from glucose than the strains which lack the gene alkL from Pseudomonas putida GPo1. In particular, E. coli W3110 ΔfadE pCDF[alkL]/pHg-12-58 can produce more fatty alcohols and fatty aldehydes of chain length C14:0, C16:0 and C16:1, E. coli W3110 ΔfadE pCDF[alkL]/pHg-12-59 can produce more fatty alcohols and fatty aldehydes of chain length C14:0, C16:0 and C16:1, E. coli W3110 ΔfadE pCDF[alkL]/pHg-12-60 can produce more fatty alcohols and fatty aldehydes of chain length C16:0 and C16:1, E. coli W3110 ΔfadE pCDF[alkL]/pHg-12-61 can produce more fatty alcohols and fatty aldehydes of chain length C8:0 and 010:0, E. coli W3110 ΔfadE pCDF[alkL]/pHg-12-62 can produce more fatty alcohols and fatty aldehydes of chain length C12:0 and C14:0, E. coli W3110 ΔfadE pCDF[alkL]/pHg-12-63 can produce more fatty alcohols and fatty aldehydes of chain length C12:0 and C14:0, E. coli JW5020-1 Kan^{s} ΔfadE pCDF[alkL]/pHg-12-58 can produce more fatty alcohols and fatty aldehydes of chain length C14:0, C16:0 and C16:1, E. coli JW5020-1 Kan^{s} ΔfadE pCDF[alkL]/pHg-12-59 can produce more fatty alcohols and fatty aldehydes of chain length C14:0, C16:0 and C16:1, E. coli JW5020-1 Kan^{s} ΔfadE pCDF[alkL]/pHg-12-60 can produce more fatty alcohols and fatty aldehydes of chain length C16:0 and C16:1, E. coli JW5020-1 Kan^{s} ΔfadE pCDF[alkL]/pHg-12-61 can produce more fatty alcohols and fatty aldehydes of chain length C8:0 and C10:0, E. coli JW5020-1 Kan^{s} ΔfadE pCDF[alkL]/pHg-12-62 can produce more fatty alcohols and fatty aldehydes of chain length C12:0 and C14:0 and E. coli JW5020-1 Kan^{s ΔfadE pCDF[alkL]/pHg-}12-63 can produce more fatty alcohols and fatty aldehydes of chain length C12:0 and C14:0 from glucose than the corresponding strains which lack the gene alkL from Pseudomonas putida GPo1.

### Example 28

### Preparation of E. coli Expression Vectors for the Gene oleT_{JE} from Jeotgalicoccus sp. ATCC 8456 for Preparation of Alkenes

[0433] For the preparation of expression vectors, the sequence of the gene oleT_{JE} (SEQ ID No. 168) from Jeotgalicoccus sp. ATCC 8456 (encoding an enzyme Eₓᵢ) was codon-optimized for expression in E. coli with DNA2.0 (DNA2.0 Inc., Menlo Park, Calif., USA) and synthesized in combination with the P_{lac} promotor (SEQ ID No. 149) or the P_{lac} promotor and the alkL gene (SEQ ID No. 1). The cloning of the constructs P_{lac}-oleT_{JE} (SEQ ID No. 170) and P_{lac}-oleT_{JE}-alkL (SEQ ID No. 171) proceeded in vectors specific to DNA2.0. Both constructs are terminated by a terminator sequence (SEQ ID No. 172). In addition, a cleavage site (EcoNI or NotI) was introduced upstream of the P_{lac} promotor and downstream of the terminator in each case. The synthesized DNA fragments P_{lac}-oleT_{JE} and P_{lac}-oleT_{JE}-alkL and the vector pCDFDuet-1 (Merck, Darmstadt) (SEQ ID No 53) were cut with the restriction endonucleases EcoNI and NotI (New England Biolabs, Frankfurt) in accordance with the manufacturer's instructions. The NdeI-NotI-cut constructs and the cut vector were then applied to a 1% strength agarose gel. The agarose gel electrophoresis, ethidium bromide staining of the DNA and determination of the fragment sizes was carried out in the manner known to those skilled in the art. For isolation of the DNA from an agarose gel, the target DNA was cut out from the gel with a scalpel and purified using the “Quick Gel Extraction Kit” from Qiagen (Hilden). The procedure was in accordance with the manufacturer's instructions.

[0434] Subsequently, the fragment P_{lac}-oleT_{JE} or P_{lac}-oleT_{JE}-alkL carried out was ligated into the vector pCDFDuet-1 vector via the T4 DNA ligase (New England Biolabs, Frankfurt) in accordance with the manufacturer's instructions, obtaining the resultant vectors.

[0435] The vector pCDFDuet-1 is an E. coli vector which imparts a spectinomycin/streptomycin resistance to the organism, and also carries a CoIDF13 replication origin. The transformations of chemically competent E. coli DH5α cells (New England Biolabs, Frankfurt) proceeded in the manner known to those skilled in the art.

[0436] The correctness of the respective plasmid was controlled by restriction analysis with EcoRV.

[0437] The authenticity of the inserted fragments was checked by DNA sequencing.

[0438] The completed E. coli expression vectors were named pHg-12-66 (pCDF[P_{lac}-oleT_{JE}]; SEQ ID No 173) and pHg-12-67 (pCDF[P_{lac}-oleT_{JE}-alkL]; SEQ ID No 174).

### Example 29

### Production of Alkenes by E. coli Strains Having a Deletion in the fadE Gene and Expression Vectors for the Genes fatB1 from Cuphea Hookeriana, fatB2 from Cuphea hookeriana, fatB3 from Cocos nucifera, synUcTE from Umbellularia californica in Combination with Expression Vectors for the Gene oleT_{JE} from Jeotgalicoccus Sp. ATCC 8456 and alkL from Pseudomonas putida

[0439] First, an E. coli W3110 strain having a deletion in the fadE gene is prepared as described in Example 4.

[0440] To generate E. coli strains having the expression vectors for the genes fatB1 from Cuphea palustris or fatB2 from Cuphea palustris or fatB3 from Cocos nucifera or synUcTE from Umbellularia californica in combination with the expression vectors for the gene oleT_{JE} from Jeotgalicoccus sp. ATCC 8456 or the genes oleT_{JE} from Jeotgalicoccus sp. ATCC 8456 and alkL from Pseudomonas putida, electrocompetent cells of E. coli W3110 ΔfadE and E. coli JW5020-1 Kan^{S} are prepared. This proceeds in a manner known to those skilled in the art. The host strain E. coli JW5020-1 Kan^{s} is a descendant of E. coli JW5020-1 (CSGC, The coli genetic stock center, Yale University, New Haven, USA) and is an E. coli BW25113 derivative which carries a deletion of the fadE gene. The fadE gene was replaced by a kanamycin cassette. This was removed in a manner known to those skilled in the art (see Datsenko K. A. and Wanner B. L. (2000) PNAS 97(12):6640-6645) before equipping the strain with the expression vectors using a helper plasmid which encodes the Flp recombinase, resulting in strain E. coli JW5020-1 Kan^{S}. The competent cells were transformed using the plasmids pJ294[Ptac-ChFATB1_optEc] or pJ294[Ptac-ChFATB2_optEc] or pJ294{Ptac}[CnFATB3(co_Ec)] or pJ294[Ptac-synUcTE] in combination with pHg-12-66 or pHg-12-67 and plated onto LB plates containing ampicillin (100 μg/ml) and spectinomycin (100 μg/ml). Transformants were checked with respect to the presence of the correct plasmids by plasmid preparation and analytical restriction analysis.

[0441] In this manner the E. coli strains hereinafter were generated:
[0442] E. coli W3110 ΔfadE pJ294[Ptac-ChFATB1_optEc]/pHg-12-66
[0443] E. coli W3110 ΔfadE pJ294[Ptac-ChFATB1_optEc]/pHg-12-67
[0444] E. coli JW5020-1 Kan^{s} pJ294[Ptac-ChFATB1_optEc]/pHg-12-66
[0445] E. coli JW5020-1 Kan^{s} pJ294[Ptac-ChFATB1_optEc]/pHg-12-67
[0446] E. coli JW5020-1 Kan^{s} pJ294[Ptac-ChFATB2_optEc]/pHg-12-66
[0447] E. coli JW5020-1 Kan^{s} pJ294[Ptac-ChFATB2_optEc]/pHg-12-67
[0448] E. coli JW5020-1 Kan^{s} pJ294[Ptac-CnFATB3_optEc]/pHg-12-66
[0449] E. coli JW5020-1 Kan^{s} pJ294[Ptac-CnFATB3_optEc]/pHg-12-67
[0450] E. coli W3110 ΔfadE pJ294[Ptac-synUcTE]/pHg-12-66
[0451] E. coli W3110 ΔfadE pJ294[Ptac-synUcTE]/pHg-12-67

[0452] These strains are employed in order to investigate their ability to produce alkenes via the production of fatty acids from glucose. The following procedure is used:

The strains are subjected to a multistage aerobic culturing process. The strains under examination are initially grown in Luria-Bertani Bouillon according to Miller (Merck, Darmstadt) as a 5 ml preliminary culture each from a single colony. The next culturing step proceeds in M9 medium. The medium consisting of 38 mM disodium hydrogenphosphate dihydrate, 22 mM potassium dihydrogenphosphate, 8.6 mM sodium chloride, 37 mM ammonium chloride, 2% (w/v) glucose, 2 mM magnesium sulphate heptahydrate (all substances from Merck, Darmstadt) and 0.1% (v/v) trace element solution is adjusted to a pH of 7.4 using 25% strength ammonium hydroxide solution. The added trace element solution consisting of 9.7 mM manganese(II) chloride tetrahydrate, 6.5 mM zinc sulphate heptahydrate, 2.5 mM sodium EDTA (Titriplex III), 4.9 mM boric acid, 1 mM sodium molybdate dihydrate, 32 mM calcium chloride dihydrate, 64 mM iron(II) sulphate heptahydrate and 0.9 mM copper(II) chloride dihydrate dissolved in 1M hydrochloric acid (all substances from Merck, Darmstadt) is sterile-filtered before addition to the M9 medium. 10 ml of M9 medium are charged with 100 μg/ml of spectinomycin and 100 μg/ml of ampicillin into 100 ml conical flasks having chicane and inoculated with 0.5 ml from the preliminary culture. The culturing proceeds at 37° C. and 200 rpm in an incubating shaker. After a culturing time of 8 hours, 50 ml of M9 medium containing 100 μg/ml of spectinomycin and 100 μg/ml of ampicillin are charged in a 250 ml conical flask with chicane and inoculated with the 10 ml culture in such a manner that an optical density (600 nm) of 0.2 is achieved. The culturing proceeds at 37° C. and 200 rpm in an incubating shaker. On reaching an optical density (600 nm) of 0.6 to 0.8, the gene expression is induced by addition of 1 mM IPTG. The strains are cultured for a further 48 hours at 30° C. and 200 rpm in an incubating shaker. During the culturing, samples of 1 ml are withdrawn and the concentration of free fatty acids and alkenes of differing carbon chain lengths are quantified using the method described in Example 30. It is shown that the strains E. coli W3110 ΔfadE pJ294[Ptac-ChFATB1_optEc]/pHg-12-67, E. coli JW5020-1 Kan^{s} pJ294[Ptac-ChFATB1_optEc]/pHg-12-67, E. coli JW5020-1 Kan^{s} pJ294[Ptac-ChFATB2_optEc]/pHg-12-67, E. coli JW5020-1 Kan^{s} pJ294[Ptac-CnFATB3_optEc]/pHg-12-67 and E. coil W3110 ΔfadE pJ294[Ptac-synUcTE]/pHg-12-67 can produce higher titres of alkenes of different chain length from glucose than the strains which lack the gene alkL from Pseudomonas putida GPo1. In particular E. coli W3110 ΔfadE pJ294[Ptac-ChFATB1_optEc]/pHg-12-67 can produce more 1-alkenes of chain length C13 and C15 and also 1,8-dienes of chain length C15, E. coli JW5020-1 Kan^{s} pJ294[Ptac-ChFATB1_optEc]/pHg-12-67 can produce more 1-alkenes of chain length C13 and C15 and also 1,8-dienes of chain length C15, E. coli JW5020-1 Kan^{s} pJ294[Ptac-ChFATB2_optEc]/pHg-12-67 can produce more 1-alkenes of chain length C7 and C9, E. coil JW5020-1 Kan^{s} pJ294[Ptac-CnFATB3_optEc]/pHg-12-67 can produce more 1-alkenes of chain length C11 and C13 and also 1,8-dienes of chain length C15 and E. coli W3110 ΔfadE pJ294[Ptac-synUcTE]/pHg-12-67 can produce more 1-alkenes of chain length C11 and C13 from glucose than the corresponding strains which lack the gene alkL from Pseudomonas putida GPo1.

### Example 30

### Chromatographic Quantification of Alkenes

[0453] Alkenes are quantified by means of gas chromatography with coupled mass spectrometry (GC/MS).

[0454] To extract the samples, consisting of 1 ml of culture broth, they are admixed with 500 μl of ethyl acetate (Chromasolv®Plus 99.9%, Sigma No. 650528-1L), shaken for 10 min at 12 Hz and sedimented for 5 min at 13 200 rpm in a bench centrifuge (Eppendorf, Hamburg). The organic phase (ethyl acetate) is transferred to HPLC vials with an insert and analysed by means of coupled GC/MS for alkenes of differing chain length (C8-C18).

[0455] For separation of alkenes, the capillary column ZB-50 having the dimensions 30 m×320 μm and a film thickness of 0.5 μm (Phenomenex, Aschaffenburg) is used as stationary phase. The carrier gas used is helium at a constant flow rate of 1.5 ml/min. The separation proceeds in the course of 45 min at an injector temperature of 250° C. and a detector temperature of 250° C. The column temperature at the start is 40° C. and is held for 2 min. Subsequently, the column temperature is raised at 7° C./min to 150° C., then raised at 15° C./min to 320° C. and held for 10 min. The injection volume is 1 μl splitless. The detection proceeds by means of an MS (DSQ II) detector (Thermo Fisher Scientific) with a mass range of 12-800 m/z (0-8 min SIM at m/z 55.97). The reference substance employed for the alkenes is a standard mixture consisting of in each case 10 μg/ml 1-octene (Sigma-Aldrich), 1-decene (94%, Sigma-Aldrich), 1-dodecene (>99%, Sigma-Aldrich), 1-tetradecene (>97%, Sigma-Aldrich), 1-hexadecene (99.9%, Sigma-Aldrich), 1-octadecene (Sigma-Aldrich), for calibration. Relative quantification of the samples is performed via the peak areas.

1. A microorganism comprising:
a first genetic modification so that the microorganism is capable of forming more of an organic substance from at least one simple carbon source in comparison to a wild type version of the microorganism, and
a second genetic modification so that the microorganism forms more of an alkL gene product in comparison to a wild type version of the microorganism.

2. The microorganism of claim 1, wherein the organic substance is selected from the group consisting of:
an optionally substituted carboxylic acid,
an optionally substituted carboxylic acid ester,
an optionally substituted alkane having 3 to 34 carbon atoms,
an optionally substituted alkene having 3 to 34 carbon atoms,
an optionally substituted monohydric alcohol having 3 to 34 carbon atoms,
an optionally substituted aldehydes having 3 to 34 carbon atoms, and
an optionally substituted monovalent amine having 3 to 34 carbon atoms.

3. The microorganism of claim 1, wherein the organic substance is selected from the group consisting of a fatty acid, a fatty acid ester, an alkan-1-al, and alkan-1-ol, an alkan-1-amine, and alkane and an alkene.

4. The microorganism of claim 1, wherein the alkL gene product is encoded by an alkL gene from a Gram-negative bacterium.

5. The microorganism of claim 1, wherein the alkL gene product is selected from the group consisting of:
a protein encoded by SEQ ID NO: 1;
a protein encoded by SEQ ID NO: 3;
a protein comprising a polypeptide sequence selected from the group consisting of SEQ ID NO: 2, SEQ ID NO: 30, SEQ ID NO: 31, SEQ ID NO: 32, and SEQ ID NO: 33; and
a protein comprising a polypeptide sequence in which up to 60% of the amino acid residues are modified compared to SEQ ID NO: 2, SEQ ID NO: 30, SEQ ID NO: 31, SEQ ID NO: 32, or SEQ ID NO: 33 by deletion, insertion, substitution or a combination thereof, wherein the protein has at least 50% of an activity compared to SEQ ID NO: 2, SEQ ID NO: 30, SEQ ID NO: 31, SEQ ID NO: 32, or SEQ ID NO: 33, respectively.

6. The microorganism of claim 1, which is a Gram-negative bacterium.

7. The microorganism of claim 1, wherein the first genetic modification affects an activity of at least one enzyme selected from the group consisting of:
Eᵢ acyl-ACP thioesterase,
Eᵢᵢ acyl-CoA thioesterase,
E_{iib} acyl-CoA:ACP transacylase,
Eᵢᵢᵢ polyketide synthase that catalyzes a reaction involved in the synthesis of carboxylic acids and carboxylic acid esters, and
Eᵢᵥ hexanoic acid synthase,
wherein the activity is increased in comparison to an enzymatic activity of the wild type version of the microorganism.

8. The microorganism of claim 1, further comprising a third genetic modification that affects an activity of at least one enzyme selected from the group consisting of:
E_{iib} acyl-CoA:ACP transacylase,
Eᵥ wax ester synthase or alcohol O-acyl transferase,
Eᵥₐ fatty acid-O-methyltransferase that catalyzes the synthesis of a fatty acid methyl ester from a fatty acid and S-adenosylmethionine,
Eᵥᵢ acyl-CoA synthetase, and
Eᵥᵢᵢ acyl thioesterase,
wherein the activity is increased in comparison to an enzymatic activity of the wild type version of the microorganism.

9. The microorganism of claim 1, further comprising a fourth genetic modification that affects an activity of at least one enzyme selected from the group consisting of:
E_{iib} acyl-CoA:ACP transacylase,
Eᵥᵢ acyl-CoA synthetase,
Eᵥᵢᵢᵢ acyl-CoA reductase,
Eᵢₓ fatty acid reductase,
Eₓ acyl-ACP reductase,
Eₓᵢ cytochrome P450 fatty acid decarboxylase that catalyzes the conversion of an alkanoic acid with n carbon atoms into a corresponding terminal olefin with n−1 carbon atoms,
Eₓᵢᵢ alkan-1-al decarbonylase that catalyzes the conversion of an alkan-1-al (n carbon atoms) into a corresponding alkane (n−1 carbon atoms) or terminal olefin (n−1 carbon atoms), and
Eₓᵢᵢᵢ alkan-1-al transaminase that catalyzes the conversion of an alkan-1-al into a corresponding alkan-1-amine,
wherein the activity is increased in comparison to an enzymatic activity of the wild type version of the microorganism.

10. The microorganism of claim 1, further comprising a fifth genetic modification that affects an activity of at least one enzyme selected from the group consisting of:
Eₐ acyl-CoA synthetase (EC 6.2.1.3) that catalyzes the synthesis of an acyl-coenzyme A thioester,
E_{b} acyl-CoA dehydrogenase (EC 1.3.99.-, EC 1.3.99.3 or EC 1.3.99.13) that catalyzes the oxidation of an acyl-coenzyme A thioester to give a corresponding enoyl-coenzyme A thioester,
E_{c} acyl-CoA oxidase (EC 1.3.3.6) that catalyzes the oxidation of an acyl-coenzyme A thioester to give a corresponding enoyl-coenzyme A thioester,
E_{d} enoyl-CoA hydratase (EC 4.2.1.17 or EC 4.2.1.74) that catalyzes the hydratization of an enoyl-coenzyme A thioester to give a corresponding 3-hydroxyacyl-coenzyme A thioester,
E_{f} 3-hydroxyacyl-CoA dehydrogenase (EC 1.1.1.35 or EC 1.1.1.211) that catalyzes the oxidation of a 3-hydroxyacyl-coenzyme A thioester to give a corresponding 3-oxoacyl-coenzyme A thioester, and
E_{g} acetyl-CoA acyltransferase (EC 2.3.1.16) that catalyzes the transfer of an acetyl residue from a 3-oxoacyl-coenzyme A thioester to coenzymes A and thus generates an acyl-coenzyme A thioester that is shortened by two carbon atoms,
wherein the activity is reduced in comparison to an enzymatic activity of the wild type version of the microorganism.

11. The microorganism of claim 1, further comprising a seventh genetic modification that affects an activity of at least one enzyme selected from the group consisting of:
E₁ P450 alkane hydroxylases,
E_{1b} AlkB alkane hydroxylases of EC 1.14.15.3,
E_{1c} fatty alcohol oxidases of EC 1.1.3.20,
E_{1d} AlkJ alcohol dehydrogenases of EC 1.1.99,
E₁ₑ alcohol dehydrogenase of EC 1.1.1.1 or EC 1.1.1.2 and
E_{1f} aldehyde dehydrogenases of EC 1.2.1.3, EC 1.2.1.4 or EC 1.2.1.5
wherein the activity is reduced in comparison to the wild type version of the microorganism.

12. (canceled)

13. A process for producing an organic substance from a simple carbon source, the process comprising
I) contacting the microorganism of claim 1 with a medium comprising the simple carbon source,
II) culturing the microorganism under conditions which make it possible for the microorganism to form the organic substance from the simple carbon source, and
III) optionally isolating the organic substance formed.

The application's sequence listing, which the Patent Office published only in electronic form, follows.

SEQUENCE LISTING (174 sequences)

SEQ ID NO: 1 - DNA, 693 bp, Pseudomonas putida
  CDS (1)..(693)
atgagtttttctaattataaagtaatcgcgatgccggtgttggttgctaattttgttttgggggcggccactgcatgggcgaatgaaaattatccggcgaaatctgctggctataatcagggtgactgggtcgctagcttcaatttttctaaggtctatgtgggtgaggagcttggcgatctaaatgttggagggggggctttgccaaatgctgatgtaagtattggtaatgatacaacacttacgtttgatatcgcctattttgttagctcaaatatagcggtggatttttttgttggggtgccagctagggctaaatttcaaggtgagaaatcaatctcctcgctgggaagagtcagtgaagttgattacggccctgcaattctttcgcttcaatatcattacgatagctttgagcgactttatccatatgttggggttggtgttggtcgggtgctattttttgataaaaccgacggtgctttgagttcgtttgatattaaggataaatgggcgcctgcttttcaggttggccttagatatgaccttggtaactcatggatgctaaattcagatgtgcgttatattcctttcaaaacggacgtcacaggtactcttggcccggttcctgtttctactaaaattgaggttgatcctttcattctcagtcttggtgcgtcatatgttttctaa

SEQ ID NO: 2 - protein, 230 aa, Pseudomonas putida
MSFSNYKVIAMPVLVANFVLGAATAWANENYPAKSAGYNQGDWVASFNFSKVYVGEELGDLNVGGGALPNADVSIGNDTTLTFDIAYFVSSNIAVDFFVGVPARAKFQGEKSISSLGRVSEVDYGPAILSLQYHYDSFERLYPYVGVGVGRVLFFDKTDGALSSFDIKDKWAPAFQVGLRYDLGNSWMLNSDVRYIPFKTDVTGTLGPVPVSTKIEVDPFILSLGASYVF

SEQ ID NO: 3 - DNA, 33 bp, Artificial
  Primer
accacagccaggatccttcaatattattgaagc

SEQ ID NO: 4 - DNA, 15 bp, Artificial
  Primer
atgccactctccttg

SEQ ID NO: 5 - DNA, 30 bp, Artificial
  Primer
caaggagagtggcatatgagtttttctaat

SEQ ID NO: 6 - DNA, 36 bp, Artificial
  Primer
ttaccagactcgagggtaccttagaaaacatatgac

SEQ ID NO: 7 - DNA, 4876 bp, Artificial
  Vector
ggggaattgtgagcggataacaattcccctgtagaaataattttgtttaactttaataaggagatataccatgggcagcagccatcaccatcatcaccacagccaggatccttcaatattattgaagcatttatcagggttattgtctcatgagcggatacatatttgaatgtatttagaaaaataaacaaataggggtcagtgttacaaccaattaaccaattctgaacattatcgcgagcccatttatacctgaatatggctcataacaccccttgtttgcctggcggcagtagcgcggtggtcccacctgaccccatgccgaactcagaagtgaaacgccgtagcgccgatggtagtgtggggactccccatgcgagagtagggaactgccaggcatcaaataaaacgaaaggctcagtcgaaagactgggcctttcgcccgggctaattatggggtgtcgcccttattcgactctatagtgaagttcctattctctagaaagtataggaacttctgaagtggggatccggccggcctgcagccccgcagggcctgtctcggtcgatcattcagcccggctcatagatatgcgggcagtgagcgcaacgcaattaatgtaagttagctcactcattaggcaccccaggcttgacactttatgcttccggctcgtataatgtgtggaattgtgagcggataacaataacaatttcacacaggatctaggaaccaaggagagtggcatgtgagtttttctaattataaagtaatcgcgatgccggtgttggttgctaattttgttttgggggcggccactgcatgggcgaatgaaaattatccggcgaaatctgctggctataatcagggtgactgggtcgctagcttcaatttttctaaggtctatgtgggtgaggagcttggcgatctaaatgttggagggggggctttgccaaatgctgatgtaagtattggtaatgatacaacacttacgtttgatatcgcctattttgttagctcaaatatagcggtggatttttttgttggggtgccagctagggctaaatttcaaggtgagaaatcaatctcctcgctgggaagagtcagtgaagttgattacggccctgcaattctttcgcttcaatatcattacgatagctttgagcgactttatccatatgttggggttggtgttggtcgggtgctattttttgataaaaccgacggtgctttgagttcgtttgatattaaggataaatgggcgcctgcttttcaggttggccttagatatgaccttggtaactcatggatgctaaattcagatgtgcgttatattcctttcaaaacggacgtcacaggtactcttggcccggttcctgtttctactaaaattgaggttgatcctttcattctcagtcttggtgcgtcatatgttttctaaggtaccctcgagtctggtaaagaaaccgctgctgcgaaatttgaacgccagcacatggactcgtctactagcgcagcttaattaacctaggctgctgccaccgctgagcaataactagcataaccccttggggcctctaaacgggtcttgaggggttttttgctgaaacctcaggcatttgagaagcacacggtcacactgcttccggtagtcaataaaccggtaaaccagcaatagacataagcggctatttaacgaccctgccctgaaccgacgaccgggtcatcgtggccggatcttgcggcccctcggcttgaacgaattgttagacattatttgccgactaccttggtgatctcgcctttcacgtagtggacaaattcttccaactgatctgcgcgcgaggccaagcgatcttcttcttgtccaagataagcctgtctagcttcaagtatgacgggctgatactgggccggcaggcgctccattgcccagtcggcagcgacatccttcggcgcgattttgccggttactgcgctgtaccaaatgcgggacaacgtaagcactacatttcgctcatcgccagcccagtcgggcggcgagttccatagcgttaaggtttcatttagcgcctcaaatagatcctgttcaggaaccggatcaaagagttcctccgccgctggacctaccaaggcaacgctatgttctcttgcttttgtcagcaagatagccagatcaatgtcgatcgtggctggctcgaagatacctgcaagaatgtcattgcgctgccattctccaaattgcagttcgcgcttagctggataacgccacggaatgatgtcgtcgtgcacaacaatggtgacttctacagcgcggagaatctcgctctctccaggggaagccgaagtttccaaaaggtcgttgatcaaagctcgccgcgttgtttcatcaagccttacggtcaccgtaaccagcaaatcaatatcactgtgtggcttcaggccgccatccactgcggagccgtacaaatgtacggccagcaacgtcggttcgagatggcgctcgatgacgccaactacctctgatagttgagtcgatacttcggcgatcaccgcttccctcatactcttcctttttcaatattattgaagcatttatcagggttattgtctcatgagcggatacatatttgaatgtatttagaaaaataaacaaatagctagctcactcggtcgctacgctccgggcgtgagactgcggcgggcgctgcggacacatacaaagttacccacagattccgtggataagcaggggactaacatgtgaggcaaaacagcagggccgcgccggtggcgtttttccataggctccgccctcctgccagagttcacataaacagacgcttttccggtgcatctgtgggagccgtgaggctcaaccatgaatctgacagtacgggcgaaacccgacaggacttaaagatccccaccgtttccggcgggtcgctccctcttgcgctctcctgttccgaccctgccgtttaccggatacctgttccgcctttctcccttacgggaagtgtggcgctttctcatagctcacacactggtatctcggctcggtgtaggtcgttcgctccaagctgggctgtaagcaagaactccccgttcagcccgactgctgcgccttatccggtaactgttcacttgagtccaacccggaaaagcacggtaaaacgccactggcagcagccattggtaactgggagttcgcagaggatttgtttagctaaacacgcggttgctcttgaagtgtgcgccaaagtccggctacactggaaggacagatttggttgctgtgctctgcgaaagccagttaccacggttaagcagttccccaactgacttaaccttcgatcaaaccacctccccaggtggttttttcgtttacagggcaaaagattacgcgcagaaaaaaaggatctcaagaagatcctttgatcttttctactgaaccgctctagatttcagtgcaatttatctcttcaaatgtagcacctgaagtcagccccatacgatataagttgtaattctcatgttagtcatgccccgcgcccaccggaaggagctgactgggttgaaggctctcaagggcatcggtcgagatcccggtgcctaatgagtgagctaacttacattaattgcgttgcgctcactgcccgctttccagtcgggaaacctgtcgtgccagctgcattaatgaatcggccaacgcgcggggagaggcggtttgcgtattgggcgccagggtggtttttcttttcaccagtgagacgggcaacagctgattgcccttcaccgcctggccctgagagagttgcagcaagcggtccacgctggtttgccccagcaggcgaaaatcctgtttgatggtggttaacggcgggatataacatgagctgtcttcggtatcgtcgtatcccactaccgagatgtccgcaccaacgcgcagcccggactcggtaatggcgcgcattgcgcccagcgccatctgatcgttggcaaccagcatcgcagtgggaacgatgccctcattcagcatttgcatggtttgttgaaaaccggacatggcactccagtcgccttcccgttccgctatcggctgaatttgattgcgagtgagatatttatgccagccagccagacgcagacgcgccgagacagaacttaatgggcccgctaacagcgcgatttgctggtgacccaatgcgaccagatgctccacgcccagtcgcgtaccgtcttcatgggagaaaataatactgttgatgggtgtctggtcagagacatcaagaaataacgccggaacattagtgcaggcagcttccacagcaatggcatcctggtcatccagcggatagttaatgatcagcccactgacgcgttgcgcgagaagattgtgcaccgccgctttacaggcttcgacgccgcttcgttctaccatcgacaccaccacgctggcacccagttgatcggcgcgagatttaatcgccgcgacaatttgcgacggcgcgtgcagggccagactggaggtggcaacgccaatcagcaacgactgtttgcccgccagttgttgtgccacgcggttgggaatgtaattcagctccgccatcgccgcttccactttttcccgcgttttcgcagaaacgtggctggcctggttcaccacgcgggaaacggtctgataagagacaccggcatactctgcgacatcgtataacgttactggtttcacattcaccaccctgaattgactctcttccgggcgctatcatgccataccgcgaaaggttttgcgccattcgatggtgtccgggatctcgacgctctcccttatgcgactcctgcattaggaaattaatacgactcactata

SEQ ID NO: 8 - DNA, 918 bp, Cuphea hookeriana
atgcacgaccgcaaatccaaacgcccggacatgctggtagactcgtttggtctggaaagcacggtccaggacggcctggtgtttcgtcaatcctttagcatccgcagctacgagattggcacggatcgtaccgcgagcatcgaaaccctgatgaaccacctgcaggaaaccagcttgaaccactgtaaatctaccggtatcctgttggatggtttcggtcgcaccctggagatgtgtaagcgtgatttgatttgggtggtgattaagatgcagatcaaagttaaccgttacccggcctggggtgacaccgttgagattaacacgcgtttcagccgtctgggtaagattggtatgggtcgcgactggctgattagcgattgcaatacgggcgaaatcctggtgcgtgcgaccagcgcgtatgccatgatgaatcagaaaactcgtcgcctgagcaagctgccgtacgaggtgcatcaggaaatcgtccctctgttcgttgactctccggttatcgaggatagcgatctgaaggtccataagttcaaggttaagaccggtgacagcatccaaaaaggcttgaccccaggctggaacgatctggatgtgaatcaacatgtcagcaacgtcaaatacattggctggattctggagagcatgccgaccgaggtcctggaaacgcaggagctgtgcagcctggctctggaatatcgtcgcgagtgcggccgtgacagcgttttggaaagcgtgacggcgatggacccgtccaaagttggtgtgcgtagccaatatcaacacctgctgcgtctggaggatggtactgcaatcgtcaatggtgcaaccgagtggcgtccgaaaaatgcaggtgcgaatggtgctattagcaccggcaagacgtctaatggcaacagcgtttcctaa

SEQ ID NO: 9 - DNA, 918 bp, Cuphea hookeriana
atgctggactggaaaccgaaacgccctgacatgctggtagaccctttcggtctgggtagcatcgttcaagatggcctggtttttcgtcagaatttcagcattcgcagctatgagattggcgcggaccgtaccgcgagcatcgaaacggtcatgaaccatctgcaagaaaccgccttgaatcacgtgaagattgcgggcctgagcaacgacggttttggtcgcacgccggaaatgtacaagcgcgatctgatttgggttgtcgctaagatgcaggtgatggtcaaccgttacccgacgtggggcgacacggttgaagttaacacgtgggtggccaaatcgggcaagaatggtatgcgtcgtgactggctgattagcgactgcaacaccggcgagatcctgacccgtgcatcctccgtctgggtgatgatgaatcagaaaactcgccgcctgtccaaaattccggatgaagttcgcaatgagatcgagccgcatttcgtggacagcccaccggtcatcgaggatgatgaccgtaaactgccgaagctggatgaaaagaccgcggactctattcgcaaaggtctgacgccgcgttggaacgatctggatgttaaccagcacgttaacaatgtgaagtatatcggttggattttggaaagcaccccaccggaagttctggaaacccaagagctgtgcagcctgaccttggagtaccgtcgtgagtgtggccgtgagagcgtcctggagagcctgaccgcaatggacccgagcggtggtggttacggtagccagtttcaacacttgctgcgtctggaggatggtggcgagatcgtcaagggccgtaccgagtggcgtccgaaaaatggtgtgatcaatggcgtggtgccgactggtgaaagctctccgggtgattatagctaa

SEQ ID NO: 10 - DNA, 918 bp, Cuphea palustris
atgctggaccgcaaatccaaacgccctgacatgctggtcgaacctctgggtgttgatcgtatcgtctacgatggtgttagctttcgtcagagcttcagcattcgcagctacgagatcggcgctgatcgcactgcgtctattgaaaccctgatgaacatgtttcaggaaacgtcgctgaatcactgcaaaatcattggcctgttgaacgatggcttcggccgtaccccggagatgtgtaagcgtgacctgatctgggtcgtcacgaagatgcagattgaagtgaatcgttatccgacctggggtgataccatcgaggtgaatacgtgggtgtccgccagcggtaagcacggtatgggccgtgactggctgatttctgactgtcataccggtgagatcctgattcgtgcgaccagcgtgtgggccatgatgaaccagaaaactcgtcgcctgagcaaaatcccgtacgaagtgcgtcaggagatcgagccgcaattcgtggacagcgcaccggttattgttgacgatcgcaaattccataaactggatctgaaaaccggcgacagcatttgcaacggtctgacgccgcgttggacggatctggacgtcaaccaacacgtcaataatgtgaagtacattggttggatcttgcagagcgttccgaccgaagtgtttgaaacgcaagagctgtgcggcttgaccctggagtatcgtcgcgagtgtggtcgtgactccgttttggagtctgttaccgcaatggacccaagcaaggaaggtgatcgtagcctgtatcaacacctgctgcgcctggaggacggtgcggatattgttaagggccgtaccgaatggcgtccgaagaacgcgggtgcgaaaggtgcaatcctgacgggtaagaccagcaacggcaatagcatcagctaa

SEQ ID NO: 11 - DNA, 4985 bp, Artificial
  Vector
accaatgcttaatcagtgaggcacctatctcagcgatctgtctatttcgttcatccatagttgcctgactccccgtcgtgtagataactacgatacgggagggcttaccatctggccccagcgctgcgatgataccgcgagaaccacgctcaccggctccggatttatcagcaataaaccagccagccggaagggccgagcgcagaagtggtcctgcaactttatccgcctccatccagtctattaattgttgccgggaagctagagtaagtagttcgccagttaatagtttgcgcaacgttgttgccatcgctacaggcatcgtggtgtcacgctcgtcgtttggtatggcttcattcagctccggttcccaacgatcaaggcgagttacatgatcccccatgttgtgcaaaaaagcggttagctccttcggtcctccgatcgttgtcagaagtaagttggccgcagtgttatcactcatggttatggcagcactgcataattctcttactgtcatgccatccgtaagatgcttttctgtgactggtgagtactcaaccaagtcattctgagaatagtgtatgcggcgaccgagttgctcttgcccggcgtcaatacgggataataccgcgccacatagcagaactttaaaagtgctcatcattggaaaacgttcttcggggcgaaaactctcaaggatcttaccgctgttgagatccagttcgatgtaacccactcgtgcacccaactgatcttcagcatcttttactttcaccagcgtttctgggtgagcaaaaacaggaaggcaaaatgccgcaaaaaagggaataagggcgacacggaaatgttgaatactcatattcttcctttttcaatattattgaagcatttatcagggttattgtctcatgagcggatacatatttgaatgtatttagaaaaataaacaaataggggtcagtgttacaaccaattaaccaattctgaacattatcgcgagcccatttatacctgaatatggctcataacaccccttgtttgcctggcggcagtagcgcggtggtcccacctgaccccatgccgaactcagaagtgaaacgccgtagcgccgatggtagtgtggggactccccatgcgagagtagggaactgccaggcatcaaataaaacgaaaggctcagtcgaaagactgggcctttcgcccgggctaattatggggtgtcgcccttattcgactctatagtgaagttcctattctctagaaagtataggaacttctgaagtgggggcggccgcaaattcagtaagcagaaagtcaaaagcctccgaccggaggcttttgactattaggaaacgctgttgccattagacgtcttgccggtgctaatagcaccattcgcacctgcatttttcggacgccactcggttgcaccattgacgattgcagtaccatcctccagacgcagcaggtgttgatattggctacgcacaccaactttggacgggtccatcgccgtcacgctttccaaaacgctgtcacggccgcactcgcgacgatattccagagccaggctgcacagctcctgcgtttccaggacctcggtcggcatgctctccagaatccagccaatgtatttgacgttgctgacatgttgattcacatccagatcgttccagcctggggtcaagcctttttggatgctgtcaccggtcttaaccttgaacttatggaccttcagatcgctatcctcgataaccggagagtcaacgaacagagggacgatttcctgatgcacctcgtacggcagcttgctcaggcgacgagttttctgattcatcatggcatacgcgctggtcgcacgcaccaggatttcgcccgtattgcaatcgctaatcagccagtcgcgacccataccaatcttacccagacggctgaaacgcgtgttaatctcaacggtgtcaccccaggccgggtaacggttaactttgatctgcatcttaatcaccacccaaatcaaatcacgcttacacatctccagggtgcgaccgaaaccatccaacaggataccggtagatttacagtggttcaagctggtttcctgcaggtggttcatcagggtttcgatgctcgcggtacgatccgtgccaatctcgtagctgcggatgctaaaggattgacgaaacaccaggccgtcctggaccgtgctttccagaccaaacgagtctaccagcatgtccgggcgtttggatttgcggtcgtgcatatgttttacctcctgttaaacaaaattatttctagagggaaaccgttgtggaattgtgagcgctcacaattccacatccacacattatacgagccgatgattaattgtcaacagcgtcgatcactgtgcatgaagctcgtaattgttatccgctcacaattggatccaaaatgaagggaagttcctatactttctagagaataggaacttctatagggagtcgaataagggcgacacaaaaggtattctaaatgcataataaatactgataacatcttatagtttgtattatattttgtattatcgttgacatgtataattttgatatcaaaaactgattttccctttattattttcgagatttattttcttaattctctttaacaaactagaaatattgtatatacaaaaaatcataaataatagatgaatagtttaattataggtgttcatcaatcgaaaaagcaacgtatcttatttaaagtgcgttgcttttttctcatttataaggttaaataattctcatatatcaagcaaagtgacaggcgcccttaaatattctgacaaatgctctttccctaaactccccccataaaaaaacccgccgaagcgggtttttacgttatttgcggattaacgattactcgttatcagaaccgcccaggatgcctggcagttccctactctcgccgctgcgctcggtcgttcggctgcgggacctcagcgctagcggagtgtatactggcttactatgttggcactgatgagggtgtcagtgaagtgcttcatgtggcaggagaaaaaaggctgcaccggtgcgtcagcagaatatgtgatacaggatatattccgcttcctcgctcactgactcgctacgctcggtcgttcgactgcggcgagcggaaatggcttacgaacggggcggagatttcctggaagatgccaggaagatacttaacagggaagtgagagggccgcggcaaagccgtttttccataggctccgcccccctgacaagcatcacgaaatctgacgctcaaatcagtggtggcgaaacccgacaggactataaagataccaggcgtttccccctggcggctccctcgtgcgctctcctgttcctgcctttcggtttaccggtgtcattccgctgttatggccgcgtttgtctcattccacgcctgacactcagttccgggtaggcagttcgctccaagctggactgtatgcacgaaccccccgttcagtccgaccgctgcgccttatccggtaactatcgtcttgagtccaacccggaaagacatgcaaaagcaccactggcagcagccactggtaattgatttagaggagttagtcttgaagtcatgcgccggttaaggctaaactgaaaggacaagttttggtgactgcgctcctccaagccagttacctcggttcaaagagttggtagctcagagaaccttcgaaaaaccgccctgcaaggcggttttttcgttttcagagcaagagattacgcgcagaccaaaacgatctcaagaagatcatcttattaatcactgcccgctttccagtcgggaaacctgtcgtgccagctgcattaatgaatcggccaacgcgcggggagaggcggtttgcgtattgggcgccagggtggtttttcttttcaccagtgagactggcaacagctgattgcccttcaccgcctggccctgagagagttgcagcaagcggtccacgctggtttgccccagcaggcgaaaatcctgtttgatggtggttaacggcgggatataacatgagctatcttcggtatcgtcgtatcccactaccgagatatccgcaccaacgcgcagcccggactcggtaatggcgcgcattgcgcccagcgccatctgatcgttggcaaccagcatcgcagtgggaacgatgccctcattcagcatttgcatggtttgttgaaaaccggacatggcactccagtcgccttcccgttccgctatcggctgaatttgattgcgagtgagatatttatgccagccagccagacgcagacgcgccgagacagaacttaatgggcccgctaacagcgcgatttgctggtgacccaatgcgaccagatgctccacgcccagtcgcgtaccgtcctcatgggagaaaataatactgttgatgggtgtctggtcagagacatcaagaaataacgccggaacattagtgcaggcagcttccacagcaatggcatcctggtcatccagcggatagttaatgatcagcccactgacgcgttgcgcgagaagattgtgcaccgccgctttacaggcttcgacgccgcttcgttctaccatcgacaccaccacgctggcacccagttgatcggcgcgagatttaatcgccgcgacaatttgcgacggcgcgtgcagggccagactggaggtggcaacgccaatcagcaacgactgtttgcccgccagttgttgtgccacgcggttgggaatgtaattcagctccgccatcgccgcttccactttttcccgcgttttcgcagaaacgtggctggcctggttcaccacgcgggaaacggtctgataagagacaccggcatactctgcgacatcgtataacgttactggtttcatattcaccaccctgaattgactctcttccgggcgctatcatgccataccgcgaaaggttttgcgccattcgatggcgcgccgctttt

SEQ ID NO: 12 - DNA, 4985 bp, Artificial
  Vector
accaatgcttaatcagtgaggcacctatctcagcgatctgtctatttcgttcatccatagttgcctgactccccgtcgtgtagataactacgatacgggagggcttaccatctggccccagcgctgcgatgataccgcgagaaccacgctcaccggctccggatttatcagcaataaaccagccagccggaagggccgagcgcagaagtggtcctgcaactttatccgcctccatccagtctattaattgttgccgggaagctagagtaagtagttcgccagttaatagtttgcgcaacgttgttgccatcgctacaggcatcgtggtgtcacgctcgtcgtttggtatggcttcattcagctccggttcccaacgatcaaggcgagttacatgatcccccatgttgtgcaaaaaagcggttagctccttcggtcctccgatcgttgtcagaagtaagttggccgcagtgttatcactcatggttatggcagcactgcataattctcttactgtcatgccatccgtaagatgcttttctgtgactggtgagtactcaaccaagtcattctgagaatagtgtatgcggcgaccgagttgctcttgcccggcgtcaatacgggataataccgcgccacatagcagaactttaaaagtgctcatcattggaaaacgttcttcggggcgaaaactctcaaggatcttaccgctgttgagatccagttcgatgtaacccactcgtgcacccaactgatcttcagcatcttttactttcaccagcgtttctgggtgagcaaaaacaggaaggcaaaatgccgcaaaaaagggaataagggcgacacggaaatgttgaatactcatattcttcctttttcaatattattgaagcatttatcagggttattgtctcatgagcggatacatatttgaatgtatttagaaaaataaacaaataggggtcagtgttacaaccaattaaccaattctgaacattatcgcgagcccatttatacctgaatatggctcataacaccccttgtttgcctggcggcagtagcgcggtggtcccacctgaccccatgccgaactcagaagtgaaacgccgtagcgccgatggtagtgtggggactccccatgcgagagtagggaactgccaggcatcaaataaaacgaaaggctcagtcgaaagactgggcctttcgcccgggctaattatggggtgtcgcccttattcgactctatagtgaagttcctattctctagaaagtataggaacttctgaagtgggggcggccgcaaattcagtaagcagaaagtcaaaagcctccgaccggaggcttttgactattagctataatcacccggagagctttcaccagtcggcaccacgccattgatcacaccatttttcggacgccactcggtacggcccttgacgatctcgccaccatcctccagacgcagcaagtgttgaaactggctaccgtaaccaccaccgctcgggtccattgcggtcaggctctccaggacgctctcacggccacactcacgacggtactccaaggtcaggctgcacagctcttgggtttccagaacttccggtggggtgctttccaaaatccaaccgatatacttcacattgttaacgtgctggttaacatccagatcgttccaacgcggcgtcagacctttgcgaatagagtccgcggtcttttcatccagcttcggcagtttacggtcatcatcctcgatgaccggtgggctgtccacgaaatgcggctcgatctcattgcgaacttcatccggaattttggacaggcggcgagttttctgattcatcatcacccagacggaggatgcacgggtcaggatctcgccggtgttgcagtcgctaatcagccagtcacgacgcataccattcttgcccgatttggccacccacgtgttaacttcaaccgtgtcgccccacgtcgggtaacggttgaccatcacctgcatcttagcgacaacccaaatcagatcgcgcttgtacatttccggcgtgcgaccaaaaccgtcgttgctcaggcccgcaatcttcacgtgattcaaggcggtttcttgcagatggttcatgaccgtttcgatgctcgcggtacggtccgcgccaatctcatagctgcgaatgctgaaattctgacgaaaaaccaggccatcttgaacgatgctacccagaccgaaagggtctaccagcatgtcagggcgtttcggtttccagtccagcatatgttttacctcctgttaaacaaaattatttctagagggaaaccgttgtggaattgtgagcgctcacaattccacatccacacattatacgagccgatgattaattgtcaacagcgtcgatcactgtgcatgaagctcgtaattgttatccgctcacaattggatccaaaatgaagggaagttcctatactttctagagaataggaacttctatagggagtcgaataagggcgacacaaaaggtattctaaatgcataataaatactgataacatcttatagtttgtattatattttgtattatcgttgacatgtataattttgatatcaaaaactgattttccctttattattttcgagatttattttcttaattctctttaacaaactagaaatattgtatatacaaaaaatcataaataatagatgaatagtttaattataggtgttcatcaatcgaaaaagcaacgtatcttatttaaagtgcgttgcttttttctcatttataaggttaaataattctcatatatcaagcaaagtgacaggcgcccttaaatattctgacaaatgctctttccctaaactccccccataaaaaaacccgccgaagcgggtttttacgttatttgcggattaacgattactcgttatcagaaccgcccaggatgcctggcagttccctactctcgccgctgcgctcggtcgttcggctgcgggacctcagcgctagcggagtgtatactggcttactatgttggcactgatgagggtgtcagtgaagtgcttcatgtggcaggagaaaaaaggctgcaccggtgcgtcagcagaatatgtgatacaggatatattccgcttcctcgctcactgactcgctacgctcggtcgttcgactgcggcgagcggaaatggcttacgaacggggcggagatttcctggaagatgccaggaagatacttaacagggaagtgagagggccgcggcaaagccgtttttccataggctccgcccccctgacaagcatcacgaaatctgacgctcaaatcagtggtggcgaaacccgacaggactataaagataccaggcgtttccccctggcggctccctcgtgcgctctcctgttcctgcctttcggtttaccggtgtcattccgctgttatggccgcgtttgtctcattccacgcctgacactcagttccgggtaggcagttcgctccaagctggactgtatgcacgaaccccccgttcagtccgaccgctgcgccttatccggtaactatcgtcttgagtccaacccggaaagacatgcaaaagcaccactggcagcagccactggtaattgatttagaggagttagtcttgaagtcatgcgccggttaaggctaaactgaaaggacaagttttggtgactgcgctcctccaagccagttacctcggttcaaagagttggtagctcagagaaccttcgaaaaaccgccctgcaaggcggttttttcgttttcagagcaagagattacgcgcagaccaaaacgatctcaagaagatcatcttattaatcactgcccgctttccagtcgggaaacctgtcgtgccagctgcattaatgaatcggccaacgcgcggggagaggcggtttgcgtattgggcgccagggtggtttttcttttcaccagtgagactggcaacagctgattgcccttcaccgcctggccctgagagagttgcagcaagcggtccacgctggtttgccccagcaggcgaaaatcctgtttgatggtggttaacggcgggatataacatgagctatcttcggtatcgtcgtatcccactaccgagatatccgcaccaacgcgcagcccggactcggtaatggcgcgcattgcgcccagcgccatctgatcgttggcaaccagcatcgcagtgggaacgatgccctcattcagcatttgcatggtttgttgaaaaccggacatggcactccagtcgccttcccgttccgctatcggctgaatttgattgcgagtgagatatttatgccagccagccagacgcagacgcgccgagacagaacttaatgggcccgctaacagcgcgatttgctggtgacccaatgcgaccagatgctccacgcccagtcgcgtaccgtcctcatgggagaaaataatactgttgatgggtgtctggtcagagacatcaagaaataacgccggaacattagtgcaggcagcttccacagcaatggcatcctggtcatccagcggatagttaatgatcagcccactgacgcgttgcgcgagaagattgtgcaccgccgctttacaggcttcgacgccgcttcgttctaccatcgacaccaccacgctggcacccagttgatcggcgcgagatttaatcgccgcgacaatttgcgacggcgcgtgcagggccagactggaggtggcaacgccaatcagcaacgactgtttgcccgccagttgttgtgccacgcggttgggaatgtaattcagctccgccatcgccgcttccactttttcccgcgttttcgcagaaacgtggctggcctggttcaccacgcgggaaacggtctgataagagacaccggcatactctgcgacatcgtataacgttactggtttcatattcaccaccctgaattgactctcttccgggcgctatcatgccataccgcgaaaggttttgcgccattcgatggcgcgccgctttt

SEQ ID NO: 13 - DNA, 4985 bp, Artificial
  Vector
accaatgcttaatcagtgaggcacctatctcagcgatctgtctatttcgttcatccatagttgcctgactccccgtcgtgtagataactacgatacgggagggcttaccatctggccccagcgctgcgatgataccgcgagaaccacgctcaccggctccggatttatcagcaataaaccagccagccggaagggccgagcgcagaagtggtcctgcaactttatccgcctccatccagtctattaattgttgccgggaagctagagtaagtagttcgccagttaatagtttgcgcaacgttgttgccatcgctacaggcatcgtggtgtcacgctcgtcgtttggtatggcttcattcagctccggttcccaacgatcaaggcgagttacatgatcccccatgttgtgcaaaaaagcggttagctccttcggtcctccgatcgttgtcagaagtaagttggccgcagtgttatcactcatggttatggcagcactgcataattctcttactgtcatgccatccgtaagatgcttttctgtgactggtgagtactcaaccaagtcattctgagaatagtgtatgcggcgaccgagttgctcttgcccggcgtcaatacgggataataccgcgccacatagcagaactttaaaagtgctcatcattggaaaacgttcttcggggcgaaaactctcaaggatcttaccgctgttgagatccagttcgatgtaacccactcgtgcacccaactgatcttcagcatcttttactttcaccagcgtttctgggtgagcaaaaacaggaaggcaaaatgccgcaaaaaagggaataagggcgacacggaaatgttgaatactcatattcttcctttttcaatattattgaagcatttatcagggttattgtctcatgagcggatacatatttgaatgtatttagaaaaataaacaaataggggtcagtgttacaaccaattaaccaattctgaacattatcgcgagcccatttatacctgaatatggctcataacaccccttgtttgcctggcggcagtagcgcggtggtcccacctgaccccatgccgaactcagaagtgaaacgccgtagcgccgatggtagtgtggggactccccatgcgagagtagggaactgccaggcatcaaataaaacgaaaggctcagtcgaaagactgggcctttcgcccgggctaattatggggtgtcgcccttattcgactctatagtgaagttcctattctctagaaagtataggaacttctgaagtgggggcggccgcaaattcagtaagcagaaagtcaaaagcctccgaccggaggcttttgactattagctgatgctattgccgttgctggtcttacccgtcaggattgcacctttcgcacccgcgttcttcggacgccattcggtacggcccttaacaatatccgcaccgtcctccaggcgcagcaggtgttgatacaggctacgatcaccttccttgcttgggtccattgcggtaacagactccaaaacggagtcacgaccacactcgcgacgatactccagggtcaagccgcacagctcttgcgtttcaaacacttcggtcggaacgctctgcaagatccaaccaatgtacttcacattattgacgtgttggttgacgtccagatccgtccaacgcggcgtcagaccgttgcaaatgctgtcgccggttttcagatccagtttatggaatttgcgatcgtcaacaataaccggtgcgctgtccacgaattgcggctcgatctcctgacgcacttcgtacgggattttgctcaggcgacgagttttctggttcatcatggcccacacgctggtcgcacgaatcaggatctcaccggtatgacagtcagaaatcagccagtcacggcccataccgtgcttaccgctggcggacacccacgtattcacctcgatggtatcaccccaggtcggataacgattcacttcaatctgcatcttcgtgacgacccagatcaggtcacgcttacacatctccggggtacggccgaagccatcgttcaacaggccaatgattttgcagtgattcagcgacgtttcctgaaacatgttcatcagggtttcaatagacgcagtgcgatcagcgccgatctcgtagctgcgaatgctgaagctctgacgaaagctaacaccatcgtagacgatacgatcaacacccagaggttcgaccagcatgtcagggcgtttggatttgcggtccagcatatgttttacctcctgttaaacaaaattatttctagagggaaaccgttgtggaattgtgagcgctcacaattccacatccacacattatacgagccgatgattaattgtcaacagcgtcgatcactgtgcatgaagctcgtaattgttatccgctcacaattggatccaaaatgaagggaagttcctatactttctagagaataggaacttctatagggagtcgaataagggcgacacaaaaggtattctaaatgcataataaatactgataacatcttatagtttgtattatattttgtattatcgttgacatgtataattttgatatcaaaaactgattttccctttattattttcgagatttattttcttaattctctttaacaaactagaaatattgtatatacaaaaaatcataaataatagatgaatagtttaattataggtgttcatcaatcgaaaaagcaacgtatcttatttaaagtgcgttgcttttttctcatttataaggttaaataattctcatatatcaagcaaagtgacaggcgcccttaaatattctgacaaatgctctttccctaaactccccccataaaaaaacccgccgaagcgggtttttacgttatttgcggattaacgattactcgttatcagaaccgcccaggatgcctggcagttccctactctcgccgctgcgctcggtcgttcggctgcgggacctcagcgctagcggagtgtatactggcttactatgttggcactgatgagggtgtcagtgaagtgcttcatgtggcaggagaaaaaaggctgcaccggtgcgtcagcagaatatgtgatacaggatatattccgcttcctcgctcactgactcgctacgctcggtcgttcgactgcggcgagcggaaatggcttacgaacggggcggagatttcctggaagatgccaggaagatacttaacagggaagtgagagggccgcggcaaagccgtttttccataggctccgcccccctgacaagcatcacgaaatctgacgctcaaatcagtggtggcgaaacccgacaggactataaagataccaggcgtttccccctggcggctccctcgtgcgctctcctgttcctgcctttcggtttaccggtgtcattccgctgttatggccgcgtttgtctcattccacgcctgacactcagttccgggtaggcagttcgctccaagctggactgtatgcacgaaccccccgttcagtccgaccgctgcgccttatccggtaactatcgtcttgagtccaacccggaaagacatgcaaaagcaccactggcagcagccactggtaattgatttagaggagttagtcttgaagtcatgcgccggttaaggctaaactgaaaggacaagttttggtgactgcgctcctccaagccagttacctcggttcaaagagttggtagctcagagaaccttcgaaaaaccgccctgcaaggcggttttttcgttttcagagcaagagattacgcgcagaccaaaacgatctcaagaagatcatcttattaatcactgcccgctttccagtcgggaaacctgtcgtgccagctgcattaatgaatcggccaacgcgcggggagaggcggtttgcgtattgggcgccagggtggtttttcttttcaccagtgagactggcaacagctgattgcccttcaccgcctggccctgagagagttgcagcaagcggtccacgctggtttgccccagcaggcgaaaatcctgtttgatggtggttaacggcgggatataacatgagctatcttcggtatcgtcgtatcccactaccgagatatccgcaccaacgcgcagcccggactcggtaatggcgcgcattgcgcccagcgccatctgatcgttggcaaccagcatcgcagtgggaacgatgccctcattcagcatttgcatggtttgttgaaaaccggacatggcactccagtcgccttcccgttccgctatcggctgaatttgattgcgagtgagatatttatgccagccagccagacgcagacgcgccgagacagaacttaatgggcccgctaacagcgcgatttgctggtgacccaatgcgaccagatgctccacgcccagtcgcgtaccgtcctcatgggagaaaataatactgttgatgggtgtctggtcagagacatcaagaaataacgccggaacattagtgcaggcagcttccacagcaatggcatcctggtcatccagcggatagttaatgatcagcccactgacgcgttgcgcgagaagattgtgcaccgccgctttacaggcttcgacgccgcttcgttctaccatcgacaccaccacgctggcacccagttgatcggcgcgagatttaatcgccgcgacaatttgcgacggcgcgtgcagggccagactggaggtggcaacgccaatcagcaacgactgtttgcccgccagttgttgtgccacgcggttgggaatgtaattcagctccgccatcgccgcttccactttttcccgcgttttcgcagaaacgtggctggcctggttcaccacgcgggaaacggtctgataagagacaccggcatactctgcgacatcgtataacgttactggtttcatattcaccaccctgaattgactctcttccgggcgctatcatgccataccgcgaaaggttttgcgccattcgatggcgcgccgctttt

SEQ ID NO: 14 - DNA, 2445 bp, Escherichia coli
atgatgattttgagtattctcgctacggttgtcctgctcggcgcgttgttctatcaccgcgtgagcttatttatcagcagtctgattttgctcgcctggacagccgccctcggcgttgctggtctgtggtcggcgtgggtactggtgcctctggccattatcctcgtgccatttaactttgcgcctatgcgtaagtcgatgatttccgcgccggtatttcgcggtttccgtaaggtgatgccgccgatgtcgcgcactgagaaagaagcgattgatgcgggcaccacctggtgggagggcgacttgttccagggcaagccggactggaaaaagctgcataactatccgcagccgcgcctgaccgccgaagagcaagcgtttctcgacggcccggtagaagaagcctgccggatggcgaatgatttccagatcacccatgagctggcggatctgccgccggagttgtgggcgtaccttaaagagcatcgtttcttcgcgatgatcatcaaaaaagagtacggcgggctggagttctcggcttatgcccagtctcgcgtgctgcaaaaactctccggcgtgagcgggatcctggcgattaccgtcggcgtgccaaactcattaggcccgggcgaactgttgcaacattacggcactgacgagcagaaagatcactatctgccgcgtctggcgcgtggtcaggagatcccctgctttgcactgaccagcccggaagcgggttccgatgcgggcgcgattccggacaccgggattgtctgcatgggcgaatggcagggccagcaggtgctggggatgcgtctgacctggaacaaacgctacattacgctggcaccgattgcgaccgtgcttgggctggcgtttaaactctccgacccggaaaaattactcggcggtgcagaagatttaggcattacctgtgcgctgatcccaaccaccacgccgggcgtggaaattggtcgtcgccacttcccgctgaacgtaccgttccagaacggaccgacgcgcggtaaagatgtcttcgtgccgatcgattacatcatcggcgggccgaaaatggccgggcaaggctggcggatgctggtggagtgcctctcggtaggccgcggcatcaccctgccttccaactcaaccggcggcgtgaaatcggtagcgctggcaaccggcgcgtatgctcacattcgccgtcagttcaaaatctctattggtaagatggaagggattgaagagccgctggcgcgtattgccggtaatgcctacgtgatggatgctgcggcatcgctgattacctacggcattatgctcggcgaaaaacctgccgtgctgtcggctatcgttaagtatcactgtacccaccgcgggcagcagtcgattattgatgcgatggatattaccggcggtaaaggcattatgctcgggcaaagcaacttcctggcgcgtgcttaccagggcgcaccgattgccatcaccgttgaaggggctaacattctgacccgcagcatgatgatcttcggacaaggagcgattcgttgccatccgtacgtgctggaagagatggaagcggcgaagaacaatgacgtcaacgcgttcgataaactgttgttcaaacatatcggtcacgtcggtagcaacaaagttcgcagcttctggctgggcctgacgcgcggtttaaccagcagcacgccaaccggcgatgccactaaacgctactatcagcacctgaaccgcctgagcgccaacctcgccctgctttctgatgtctcgatggcagtgctgggcggcagcctgaaacgtcgcgagcgcatctcggcccgtctgggggatattttaagccagctctacctcgcctctgccgtgctgaagcgttatgacgacgaaggccgtaatgaagccgacctgccgctggtgcactggggcgtacaagatgcgctgtatcaggctgaacaggcgatggatgatttactgcaaaacttcccgaaccgcgtggttgccgggctgctgaatgtggtgatcttcccgaccggacgtcattatctggcaccttctgacaagctggatcataaagtggcgaagattttacaagtgccgaacgccacccgttcccgcattggtcgcggtcagtacctgacgccgagcgagcataatccggttggcttgctggaagaggcgctggtggatgtgattgccgccgacccaattcatcagcggatctgtaaagagctgggtaaaaacctgccgtttacccgtctggatgaactggcgcacaacgcgctggtgaaggggctgattgataaagatgaagccgctattctggtgaaagctgaagaaagccgtctgcgcagtattaacgttgatgactttgatccggaagagctggcgacgaagccggtaaagttgccggagaaagtgcggaaagttgaagccgcgtaa

SEQ ID NO: 15 - DNA, 1016 bp, Artificial
  k/o construct
gcggccgcaacgtcagaaatagcaatcgccgggtagcccggacggttttcacggtagcgaccggtcaactcttcggcaaagtgcatagcgtcgcaatgggaaccgccgttgccgcaggaaagcactttgccaccggctttaaagctgtctgctaacaggaccgccgcgcgctgaatggcgtgaatattggcgtcatcttttaaaaagttagccagcgtttccgccgcttcgttcagttcgttacgaataagatcctggtacatgaggatatccttcagcataaatgtaatagacaaaatgcagtgtaccggataccgccaaaagcgagaagtacgggcaggtgctatgaccaggactttttgacctgaagtgcggataaaaacagcaacaatgtgagctttgttgtaattatattgtaaacatattgctaaatgtttttacatccactacaaccatatcatcacaagtggtcagacctcctacaagtaaggggcttttcgttatgatgcggaaagttgaagccgcgtaaatgaataacggagccgaaaggctccgtttctttatccgctaattatttaaaattaaagccatccggatggttttccaggctgccggtcaacgccgcgaacaacaccgttttaccatcaatcgaaagcgcatcgttcacattcagccaggtgagtttctcttgcgacgttttctcatcaatagtcgagaacagccccgtcatctgattagatttctcggaccacatcacagcgatacgttgcgagccacagtcatgcggtttgcacgcgctcatcacctgatacgtctcatctcccaacgttacggtttgtgcgggagtataagtaccgcctttcatcacccaggcaggcagcttatgcccttgtaccatctgattaaatgcagctttggtggtttcgccctttgcaaggctgctaatggttaaatcatcctgcgccattgcactggtggcgatgaccagagcggcgactgtcgttattggcggccgc

SEQ ID NO: 16 - DNA, 6647 bp, Artificial
  Vector
ccctttcgtcttcgaataaatacctgtgacggaagatcacttcgcagaataaataaatcctggtgtccctgttgataccgggaagccctgggccaacttttggcgaaaatgagacgttgatcggcacgtaagaggttccaactttcaccataatgaaataagatcactaccgggcgtattttttgagttatcgagattttcaggagctaaggaagctaaaatggagaaaaaaatcactggatataccaccgttgatatatcccaatggcatcgtaaagaacattttgaggcatttcagtcagttgctcaatgtacctataaccagaccgttcagctggatattacggcctttttaaagaccgtaaagaaaaataagcacaagttttatccggcctttattcacattcttgcccgcctgatgaatgctcatccggaattccgtatggcaatgaaagacggtgagctggtgatatgggatagtgttcacccttgttacaccgttttccatgagcaaactgaaacgttttcatcgctctggagtgaataccacgacgatttccggcagtttctacacatatattcgcaagatgtggcgtgttacggtgaaaacctggcctatttccctaaagggtttattgagaatatgtttttcgtctcagccaatccctgggtgagtttcaccagttttgatttaaacgtggccaatatggacaacttcttcgcccccgttttcaccatgggcaaatattatacgcaaggcgacaaggtgctgatgccgctggcgattcaggttcatcatgccgtttgtgatggcttccatgtcggcagaatgcttaatgaattacaacagtactgcgatgagtggcagggcggggcgtaatttttttaaggcagttattggtgcccttaaacgcctggttgctacgcctgaataagtgataataagcggatgaatggcagaaattcgaaagcaaattcgacccggtcgtcggttcagggcagggtcgttaaatagccgcttatgtctattgctggtctcggtacccggggatcgcggccgcaacgtcagaaatagcaatcgccgggtagcccggacggttttcacggtagcgaccggtcaactcttcggcaaagtgcatagcgtcgcaatgggaaccgccgttgccgcaggaaagcactttgccaccggctttaaagctgtctgctaacaggaccgccgcgcgctgaatggcgtgaatattggcgtcatcttttaaaaagttagccagcgtttccgccgcttcgttcagttcgttacgaataagatcctggtacatgaggatatccttcagcataaatgtaatagacaaaatgcagtgtaccggataccgccaaaagcgagaagtacgggcaggtgctatgaccaggactttttgacctgaagtgcggataaaaacagcaacaatgtgagctttgttgtaattatattgtaaacatattgctaaatgtttttacatccactacaaccatatcatcacaagtggtcagacctcctacaagtaaggggcttttcgttatgatgcggaaagttgaagccgcgtaaatgaataacggagccgaaaggctccgtttctttatccgctaattatttaaaattaaagccatccggatggttttccaggctgccggtcaacgccgcgaacaacaccgttttaccatcaatcgaaagcgcatcgttcacattcagccaggtgagtttctcttgcgacgttttctcatcaatagtcgagaacagccccgtcatctgattagatttctcggaccacatcacagcgatacgttgcgagccacagtcatgcggtttgcacgcgctcatcacctgatacgtctcatctcccaacgttacggtttgtgcgggagtataagtaccgcctttcatcacccaggcaggcagcttatgcccttgtaccatctgattaaatgcagctttggtggtttcgccctttgcaaggctgctaatggttaaatcatcctgcgccattgcactggtggcgatgaccagagcggcgactgtcgttattggcggccgcgatcctctagagtcgaccggtggcgaatgggacgcgccctgtagcggcgcattaagcgcggcgggtgtggtggttacgcgcagcgtgaccgctacacttgccagcgccctagcgcccgctcctttcgctttcttcccttcctttctcgccacgttcgccggctttccccgtcaagctctaaatcgggggctccctttagggttccgatttagtgctttacggcacctcgaccccaaaaaacttgattagggtgatggttcacgtagtgggccatcgccctgatagacggtttttcgccctttgacgttggagtccacgttctttaatagtggactcttgttccaaactggaacaacactcaaccctatctcggtctattcttttgatttataagggattttgccgatttcggcctattggttaaaaaatgagctgatttaacaaaaatttaacgcgaattttaacaaaatattaacgcttacaatttaggtggcacttttcggggaaatgtgcgcggaacccctatttgtttatttttctaaatacattcaaatatgtatccgctcaccgcgatcctttttaacccatcacatatacctgccgttcactattatttagtgaaatgagatattatgatattttctgaattgtgattaaaaaggcaactttatgcccatgcaacagaaactataaaaaatacagagaatgaaaagaaacagatagattttttagttctttaggcccgtagtctgcaaatccttttatgattttctatcaaacaaaagaggaaaatagaccagttgcaatccaaacgagagtctaatagaatgaggtcgaaaagtaaatcgcgcgggtttgttactgataaagcaggcaagacctaaaatgtgtaaagggcaaagtgtatactttggcgtcaccccttacatattttaggtctttttttattgtgcgtaactaacttgccatcttcaaacaggagggctggaagaagcagaccgctaacacagtacataaaaaaggagacatgaacgatgaacatcaaaaagtttgcaaaacaagcaacagtattaacctttactaccgcactgctggcaggaggcgcaactcaagcgtttgcgaaagaaacgaaccaaaagccatataaggaaacatacggcatttcccatattacacgccatgatatgctgcaaatccctgaacagcaaaaaaatgaaaaatatcaagttcctgattcgtccacaattaaaaatatctcttctgcaaaaggcctggacgtttgggacagctggccattacaaaacgctgacggcactgtcgcaaactatcacggctaccacatcgtctttgcattagccggagatcctaaaaatgcggatgacacatcgatttacatgttctatcaaaaagtcggcgaaacttctattgacagctggaaaaacgctggccgcgtctttaaagacagcgacaaattcgatgcaaatgattctatcctaaaagaccaaacacaagaatggtcaggttcagccacatttacatctgacggaaaaatccgtttattctacactgatttctccggtaaacattacggcaaacaaacactgacaactgcacaagttaacgtatcagcatcagacagctctttgaacatcaacggtgtagaggattataaatcaatctttgacggtgacggaaaaacgtatcaaaatgtacagcagttcatcgatgaaggcaactacagctcaggcgacaaccatacgctgagagatcctcactacgtagaagataaaggccacaaatacttagtatttgaagcaaacactggaactgaagatggctaccaaggcgaagaatctttatttaacaaagcatactatggcaaaagcacatcattcttccgtcaagaaagtcaaaaacttctgcaaagcgataaaaaacgcacggctgagttagcaaacggcgctctcggtatgattgagctaaacgatgattacacactgaaaaaagtgatgaaaccgctgattgcatctaacacagtaacagatgaaattgaacgcgcgaacgtctttaaaatgaacggcaaatggtacctgttcactgactcccgcggatcaaaaatgacgattgacggcattacgtctaacgatatttacatgcttggttatgtttctaattctttaactggcccatacaagccgctgaacaaaactggccttgtgttaaaaatggatcttgatcctaacgatgtaacctttacttactcacacttcgctgtacctcaagcgaaaggaaacaatgtcgtgattacaagctatatgacaaacagaggattctacgcagacaaacaatcaacgtttgcgccaagcttcctgctgaacatcaaaggcaagaaaacatctgttgtcaaagacagcatccttgaacaaggacaattaacagttaacaaataaaaacgcaaaagaaaatgccgatccggtttattgactaccggaagcagtgtgaccgtgtgcttctcaaatgcctcaggctgtctatgtgtgactgttgagctgtaacaagttgtctcaggtgttcaatttcatgttctagttgctttgttttactggtttcacctgttctattaggtgttacatgctgttcatctgttacattgtcgatctgttcatggtgaacagctttaaatgcaccaaaaactcgtaaaagctctgatgtatctatcttttttacaccgttttcatctgtgcatatggacagttttccctttgatatctaacggtgaacagttgttctacttttgtttgttagtcttgatgcttcactgatagatacaagagccataagaacctcagatccttccgtatttagccagtatgttctctagtgtggttcgttgtttttgcgtgagccatgagaacgaaccattgagatcatgcttactttgcatgtcactcaaaaattttgcctcaaaactggtgagctgaatttttgcagttaaagcatcgtgtagtgtttttcttagtccgttacgtaggtaggaatctgatgtaatggttgttggtattttgtcaccattcatttttatctggttgttctcaagttcggttacgagatccatttgtctatctagttcaacttggaaaatcaacgtatcagtcgggcggcctcgcttatcaaccaccaatttcatattgctgtaagtgtttaaatctttacttattggtttcaaaacccattggttaagccttttaaactcatggtagttattttcaagcattaacatgaacttaaattcatcaaggctaatctctatatttgccttgtgagttttcttttgtgttagttcttttaataaccactcataaatcctcatagagtatttgttttcaaaagacttaacatgttccagattatattttatgaatttttttaactggaaaagataaggcaatatctcttcactaaaaactaattctaatttttcgcttgagaacttggcatagtttgtccactggaaaatctcaaagcctttaaccaaaggattcctgatttccacagttctcgtcatcagctctctggttgctttagctaatacaccataagcattttccctactgatgttcatcatctgagcgtattggttataagtgaacgataccgtccgttctttccttgtagggttttcaatcgtggggttgagtagtgccacacagcataaaattagcttggtttcatgctccgttaagtcatagcgactaatcgctagttcatttgctttgaaaacaactaattcagacatacatctcaattggtctaggtgattttaatcactataccaattgagatgggctagtcaatgataattactagtccttttcctttgagttgtgggtatctgtaaattctgctagacctttgctggaaaacttgtaaattctgctagaccctctgtaaattccgctagacctttgtgtgttttttttgtttatattcaagtggttataatttatagaataaagaaagaataaaaaaagataaaaagaatagatcccagccctgtgtataactcactactttagtcagttccgcagtattacaaaaggatgtcgcaaacgctgtttgctcctctacaaaacagaccttaaaaccctaaaggcttaagtagcaccctcgcaagctcgggcaaatcgctgaatattccttttgtctccgaccatcaggcacctgagtcgctgtctttttcgtgacattcagttcgctgcgctcacggctctggcagtgaatgggggtaaatggcactacaggcgccttttatggattcatgcaaggaaactacccataatacaagaaaagcccgtcacgggcttctcagggcgttttatggcgggtctgctatgtggtgctatctgactttttgctgttcagcagttcctgccctctgattttccagtctgaccacttcggattatcccgtgacaggtcattcagactggctaatgcacccagtaaggcagcggtatcatcaacaggcttacccgtcttactgtcggatcgacgctctcccttatgcgactcctgcat

SEQ ID NO: 17 - DNA, 24 bp, Artificial
  k/o result
atgcggaaagttgaagccgcgtaa

SEQ ID NO: 18 - DNA, 1752 bp, Escherichia coli
atgttaacggcatgtatatcatttggggttgcgatgacgacgaacacgcattttagaggtgaagaattgaagaaggtttggcttaaccgttatcccgcggacgttccgacggagatcaaccctgaccgttatcaatctctggtagatatgtttgagcagtcggtcgcgcgctacgccgatcaacctgcgtttgtgaatatgggggaggtaatgaccttccgcaagctggaagaacgcagtcgcgcgtttgccgcttatttgcaacaagggttggggctgaagaaaggcgatcgcgttgcgttgatgatgcctaatttattgcaatatccggtggcgctgtttggcattttgcgtgccgggatgatcgtcgtaaacgttaacccgttgtataccccgcgtgagcttgagcatcagcttaacgatagcggcgcatcggcgattgttatcgtgtctaactttgctcacacactggaaaaagtggttgataaaaccgccgttcagcacgtaattctgacccgtatgggcgatcagctatctacggcaaaaggcacggtagtcaatttcgttgttaaatacatcaagcgtttggtgccgaaataccatctgccagatgccatttcatttcgtagcgcactgcataacggctaccggatgcagtacgtcaaacccgaactggtgccggaagatttagcttttctgcaatacaccggcggcaccactggtgtggcgaaaggcgcgatgctgactcaccgcaatatgctggcgaacctggaacaggttaacgcgacctatggtccgctgttgcatccgggcaaagagctggtggtgacggcgctgccgctgtatcacatttttgccctgaccattaactgcctgctgtttatcgaactgggtgggcagaacctgcttatcactaacccgcgcgatattccagggttggtaaaagagttagcgaaatatccgtttaccgctatcacgggcgttaacaccttgttcaatgcgttgctgaacaataaagagttccagcagctggatttctccagtctgcatctttccgcaggcggtgggatgccagtgcagcaagtggtggcagagcgttgggtgaaactgaccggacagtatctgctggaaggctatggccttaccgagtgtgcgccgctggtcagcgttaacccatatgatattgattatcatagtggtagcatcggtttgccggtgccgtcgacggaagccaaactggtggatgatgatgataatgaagtaccaccaggtcaaccgggtgagctttgtgtcaaaggaccgcaggtgatgctgggttactggcagcgtcccgatgctaccgatgaaatcatcaaaaatggctggttacacaccggcgacatcgcggtaatggatgaagaaggattcctgcgcattgtcgatcgtaaaaaagacatgattctggtttccggttttaacgtctatcccaacgagattgaagatgtcgtcatgcagcatcctggcgtacaggaagtcgcggctgttggcgtaccttccggctccagtggtgaagcggtgaaaatcttcgtagtgaaaaaagatccatcgcttaccgaagagtcactggtgactttttgccgccgtcagctcacgggatacaaagtaccgaagctggtggagtttcgtgatgagttaccgaaatctaacgtcggaaaaattttgcgacgagaattacgtgacgaagcgcgcggcaaagtggacaataaagcctga

SEQ ID NO: 19 - DNA, 1502 bp, Acinetobacter sp. ADP1
atgcgcccattacatccgattgattttatattcctgtcactagaaaaaagacaacagcctatgcatgtaggtggtttatttttgtttcagattcctgataacgccccagacacctttattcaagatctggtgaatgatatccggatatcaaaatcaatccctgttccaccattcaacaataaactgaatgggcttttttgggatgaagatgaagagtttgatttagatcatcattttcgtcatattgcactgcctcatcctggtcgtattcgtgaattgcttatttatatttcacaagagcacagtacgctgctagatcgggcaaagcccttgtggacctgcaatattattgaaggaattgaaggcaatcgttttgccatgtacttcaaaattcaccatgcgatggtcgatggcgttgctggtatgcggttaattgaaaaatcactctcccatgatgtaacagaaaaaagtatcgtgccaccttggtgtgttgagggaaaacgtgcaaagcgcttaagagaacctaaaacaggtaaaattaagaaaatcatgtctggtattaagagtcagcttcaggcgacacccacagtcattcaagagctttctcagacagtatttaaagatattggacgtaatcctgatcatgtttcaagctttcaggcgccttgttctattttgaatcagcgtgtgagctcatcgcgacgttttgcagcacagtcttttgacctagatcgttttcgtaatattgccaaatcgttgaatgtgaccattaatgatgttgtactagcggtatgttctggtgcattacgtgcgtatttgatgagtcataatagtttgccttcaaaaccattaattgccatggttccagcctctattcgcaatgacgattcagatgtcagcaaccgtattacgatgattctggcaaatttggcaacccacaaagatgatcctttacaacgtcttgaaattatccgccgtagtgttcaaaactcaaagcaacgcttcaaacgtatgaccagcgatcagattctaaattatagtgctgtcgtatatggccctgcaggactcaacataatttctggcatgatgccaaaacgccaagccttcaatctggttatttccaatgtgcctggcccaagagagccactttactggaatggtgccaaacttgatgcactctacccagcttcaattgtattagacggtcaagcattgaatattacaatgaccagttatttagataaacttgaagttggtttgattgcatgccgtaatgcattgccaagaatgcagaatttactgacacatttagaagaagaaattcaactatttgaaggcgtaattgcaaagcaggaagatattaaaacagccaattaaaaacaataaacttgattttttaatttatcagataaaactaaagggctaaattagccctttagtttttaacagtacgacactgtttaagtaattgatgacacacatgatgaaccattgcagtcgtg

SEQ ID NO: 20 - DNA, 147 bp, Artificial
  synthetic promotor
aacaattacgagcttcatgcacagtgatcgacgctgttgacaattaatcatcggctcgtataatgtgtggatgtggaattgtgagcgctcacaattccacaacggtttccctctagaaataattttgtttaacaggaggtaaaacat

SEQ ID NO: 21 - DNA, 35 bp, Artificial
  Primer
ttatgcgactcctgcgtttagggaaagagcatttg

SEQ ID NO: 22 - DNA, 32 bp, Artificial
  Primer
gttaacatatgttttacctcctgttaaacaaa

SEQ ID NO: 23 - DNA, 32 bp, Artificial
  Primer
taaaacatatgttaacggcatgtatatcattt

SEQ ID NO: 24 - DNA, 32 bp, Artificial
  Primer
tctcctcagacttaacgctcaggctttattgt

SEQ ID NO: 25 - DNA, 32 bp, Artificial
  Primer
gttaagtctgaggagatccacgctatgcgccc

SEQ ID NO: 26 - DNA, 34 bp, Artificial
  Primer
caattgagatctgccacgactgcaatggttcatc

SEQ ID NO: 27 - DNA, 7316 bp, Artificial
  Vector
cgggatctcgacgctctcccttatgcgactcctgcgtttagggaaagagcatttgtcagaatatttaagggcgcctgtcactttgcttgatatatgagaattatttaaccttataaatgagaaaaaagcaacgcactttaaataagatacgttgctttttcgattgatgaacacctataattaaactattcatctattatttatgattttttgtatatacaatatttctagtttgttaaagagaattaagaaaataaatctcgaaaataataaagggaaaatcagtttttgatatcaaaattatacatgtcaacgataatacaaaatataatacaaactataagatgttatcagtatttattatgcatttagaataccttttgtgtcgcccttattcgactccctatagaagttcctattctctagaaagtataggaacttcccttcattttggatccaattgtgagcggataacaattacgagcttcatgcacagtgatcgacgctgttgacaattaatcatcggctcgtataatgtgtggatgtggaattgtgagcgctcacaattccacaacggtttccctctagaaataattttgtttaacaggaggtaaaacatatgttaacggcatgtatatcatttggggttgcgatgacgacgaacacgcattttagaggtgaagaattgaagaaggtttggcttaaccgttatcccgcggacgttccgacggagatcaaccctgaccgttatcaatctctggtagatatgtttgagcagtcggtcgcgcgctacgccgatcaacctgcgtttgtgaatatgggggaggtaatgaccttccgcaagctggaagaacgcagtcgcgcgtttgccgcttatttgcaacaagggttggggctgaagaaaggcgatcgcgttgcgttgatgatgcctaatttattgcaatatccggtggcgctgtttggcattttgcgtgccgggatgatcgtcgtaaacgttaacccgttgtataccccgcgtgagcttgagcatcagcttaacgatagcggcgcatcggcgattgttatcgtgtctaactttgctcacacactggaaaaagtggttgataaaaccgccgttcagcacgtaattctgacccgtatgggcgatcagctatctacggcaaaaggcacggtagtcaatttcgttgttaaatacatcaagcgtttggtgccgaaataccatctgccagatgccatttcatttcgtagcgcactgcataacggctaccggatgcagtacgtcaaacccgaactggtgccggaagatttagcttttctgcaatacaccggcggcaccactggtgtggcgaaaggcgcgatgctgactcaccgcaatatgctggcgaacctggaacaggttaacgcgacctatggtccgctgttgcatccgggcaaagagctggtggtgacggcgctgccgctgtatcacatttttgccctgaccattaactgcctgctgtttatcgaactgggtgggcagaacctgcttatcactaacccgcgcgatattccagggttggtaaaagagttagcgaaatatccgtttaccgctatcacgggcgttaacaccttgttcaatgcgttgctgaacaataaagagttccagcagctggatttctccagtctgcatctttccgcaggcggtgggatgccagtgcagcaagtggtggcagagcgttgggtgaaactgaccggacagtatctgctggaaggctatggccttaccgagtgtgcgccgctggtcagcgttaacccatatgatattgattatcatagtggtagcatcggtttgccggtgccgtcgacggaagccaaactggtggatgatgatgataatgaagtaccaccaggtcaaccgggtgagctttgtgtcaaaggaccgcaggtgatgctgggttactggcagcgtcccgatgctaccgatgaaatcatcaaaaatggctggttacacaccggcgacatcgcggtaatggatgaagaaggattcctgcgcattgtcgatcgtaaaaaagacatgattctggtttccggttttaacgtctatcccaacgagattgaagatgtcgtcatgcagcatcctggcgtacaggaagtcgcggctgttggcgtaccttccggctccagtggtgaagcggtgaaaatcttcgtagtgaaaaaagatccatcgcttaccgaagagtcactggtgactttttgccgccgtcagctcacgggatacaaagtaccgaagctggtggagtttcgtgatgagttaccgaaatctaacgtcggaaaaattttgcgacgagaattacgtgacgaagcgcgcggcaaagtggacaataaagcctgagcgttaagtctgaggagatccacgctatgcgcccattacatccgattgattttatattcctgtcactagaaaaaagacaacagcctatgcatgtaggtggtttatttttgtttcagattcctgataacgccccagacacctttattcaagatctggtgaatgatatccggatatcaaaatcaatccctgttccaccattcaacaataaactgaatgggcttttttgggatgaagatgaagagtttgatttagatcatcattttcgtcatattgcactgcctcatcctggtcgtattcgtgaattgcttatttatatttcacaagagcacagtacgctgctagatcgggcaaagcccttgtggacctgcaatattattgaaggaattgaaggcaatcgttttgccatgtacttcaaaattcaccatgcgatggtcgatggcgttgctggtatgcggttaattgaaaaatcactctcccatgatgtaacagaaaaaagtatcgtgccaccttggtgtgttgagggaaaacgtgcaaagcgcttaagagaacctaaaacaggtaaaattaagaaaatcatgtctggtattaagagtcagcttcaggcgacacccacagtcattcaagagctttctcagacagtatttaaagatattggacgtaatcctgatcatgtttcaagctttcaggcgccttgttctattttgaatcagcgtgtgagctcatcgcgacgttttgcagcacagtcttttgacctagatcgttttcgtaatattgccaaatcgttgaatgtgaccattaatgatgttgtactagcggtatgttctggtgcattacgtgcgtatttgatgagtcataatagtttgccttcaaaaccattaattgccatggttccagcctctattcgcaatgacgattcagatgtcagcaaccgtattacgatgattctggcaaatttggcaacccacaaagatgatcctttacaacgtcttgaaattatccgccgtagtgttcaaaactcaaagcaacgcttcaaacgtatgaccagcgatcagattctaaattatagtgctgtcgtatatggccctgcaggactcaacataatttctggcatgatgccaaaacgccaagccttcaatctggttatttccaatgtgcctggcccaagagagccactttactggaatggtgccaaacttgatgcactctacccagcttcaattgtattagacggtcaagcattgaatattacaatgaccagttatttagataaacttgaagttggtttgattgcatgccgtaatgcattgccaagaatgcagaatttactgacacatttagaagaagaaattcaactatttgaaggcgtaattgcaaagcaggaagatattaaaacagccaattaaaaacaataaacttgattttttaatttatcagataaaactaaagggctaaattagccctttagtttttaacagtacgacactgtttaagtaattgatgacacacatgatgaaccattgcagtcgtggcagatctcaattggatatcggccggccacgcgatcgctgacgtcggtaccctcgagtctggtaaagaaaccgctgctgcgaaatttgaacgccagcacatggactcgtctactagcgcagcttaattaacctaggctgctgccaccgctgagcaataactagcataaccccttggggcctctaaacgggtcttgaggggttttttgctgaaacctcaggcatttgagaagcacacggtcacactgcttccggtagtcaataaaccggtaaaccagcaatagacataagcggctatttaacgaccctgccctgaaccgacgaccgggtcatcgtggccggatcttgcggcccctcggcttgaacgaattgttagacattatttgccgactaccttggtgatctcgcctttcacgtagtggacaaattcttccaactgatctgcgcgcgaggccaagcgatcttcttcttgtccaagataagcctgtctagcttcaagtatgacgggctgatactgggccggcaggcgctccattgcccagtcggcagcgacatccttcggcgcgattttgccggttactgcgctgtaccaaatgcgggacaacgtaagcactacatttcgctcatcgccagcccagtcgggcggcgagttccatagcgttaaggtttcatttagcgcctcaaatagatcctgttcaggaaccggatcaaagagttcctccgccgctggacctaccaaggcaacgctatgttctcttgcttttgtcagcaagatagccagatcaatgtcgatcgtggctggctcgaagatacctgcaagaatgtcattgcgctgccattctccaaattgcagttcgcgcttagctggataacgccacggaatgatgtcgtcgtgcacaacaatggtgacttctacagcgcggagaatctcgctctctccaggggaagccgaagtttccaaaaggtcgttgatcaaagctcgccgcgttgtttcatcaagccttacggtcaccgtaaccagcaaatcaatatcactgtgtggcttcaggccgccatccactgcggagccgtacaaatgtacggccagcaacgtcggttcgagatggcgctcgatgacgccaactacctctgatagttgagtcgatacttcggcgatcaccgcttccctcatactcttcctttttcaatattattgaagcatttatcagggttattgtctcatgagcggatacatatttgaatgtatttagaaaaataaacaaatagctagctcactcggtcgctacgctccgggcgtgagactgcggcgggcgctgcggacacatacaaagttacccacagattccgtggataagcaggggactaacatgtgaggcaaaacagcagggccgcgccggtggcgtttttccataggctccgccctcctgccagagttcacataaacagacgcttttccggtgcatctgtgggagccgtgaggctcaaccatgaatctgacagtacgggcgaaacccgacaggacttaaagatccccaccgtttccggcgggtcgctccctcttgcgctctcctgttccgaccctgccgtttaccggatacctgttccgcctttctcccttacgggaagtgtggcgctttctcatagctcacacactggtatctcggctcggtgtaggtcgttcgctccaagctgggctgtaagcaagaactccccgttcagcccgactgctgcgccttatccggtaactgttcacttgagtccaacccggaaaagcacggtaaaacgccactggcagcagccattggtaactgggagttcgcagaggatttgtttagctaaacacgcggttgctcttgaagtgtgcgccaaagtccggctacactggaaggacagatttggttgctgtgctctgcgaaagccagttaccacggttaagcagttccccaactgacttaaccttcgatcaaaccacctccccaggtggttttttcgtttacagggcaaaagattacgcgcagaaaaaaaggatctcaagaagatcctttgatcttttctactgaaccgctctagatttcagtgcaatttatctcttcaaatgtagcacctgaagtcagccccatacgatataagttgtaattctcatgttagtcatgccccgcgcccaccggaaggagctgactgggttgaaggctctcaagggcatcggtcgagatcccggtgcctaatgagtgagctaacttacattaattgcgttgcgctcactgcccgctttccagtcgggaaacctgtcgtgccagctgcattaatgaatcggccaacgcgcggggagaggcggtttgcgtattgggcgccagggtggtttttcttttcaccagtgagacgggcaacagctgattgcccttcaccgcctggccctgagagagttgcagcaagcggtccacgctggtttgccccagcaggcgaaaatcctgtttgatggtggttaacggcgggatataacatgagctgtcttcggtatcgtcgtatcccactaccgagatgtccgcaccaacgcgcagcccggactcggtaatggcgcgcattgcgcccagcgccatctgatcgttggcaaccagcatcgcagtgggaacgatgccctcattcagcatttgcatggtttgttgaaaaccggacatggcactccagtcgccttcccgttccgctatcggctgaatttgattgcgagtgagatatttatgccagccagccagacgcagacgcgccgagacagaacttaatgggcccgctaacagcgcgatttgctggtgacccaatgcgaccagatgctccacgcccagtcgcgtaccgtcttcatgggagaaaataatactgttgatgggtgtctggtcagagacatcaagaaataacgccggaacattagtgcaggcagcttccacagcaatggcatcctggtcatccagcggatagttaatgatcagcccactgacgcgttgcgcgagaagattgtgcaccgccgctttacaggcttcgacgccgcttcgttctaccatcgacaccaccacgctggcacccagttgatcggcgcgagatttaatcgccgcgacaatttgcgacggcgcgtgcagggccagactggaggtggcaacgccaatcagcaacgactgtttgcccgccagttgttgtgccacgcggttgggaatgtaattcagctccgccatcgccgcttccactttttcccgcgttttcgcagaaacgtggctggcctggttcaccacgcgggaaacggtctgataagagacaccggcatactctgcgacatcgtataacgttactggtttcacattcaccaccctgaattgactctcttccgggcgctatcatgccataccgcgaaaggttttgcgccattcgatggtgtc

SEQ ID NO: 28 - DNA, 8201 bp, Artificial
  Vector
cctgcagccccgcagggcctgtctcggtcgatcattcagcccggctcatagatatgcgggcagtgagcgcaacgcaattaatgtaagttagctcactcattaggcaccccaggcttgacactttatgcttccggctcgtataatgtgtggaattgtgagcggataacaataacaatttcacacaggatctaggaaccaaggagagtggcatgtgagtttttctaattataaagtaatcgcgatgccggtgttggttgctaattttgttttgggggcggccactgcatgggcgaatgaaaattatccggcgaaatctgctggctataatcagggtgactgggtcgctagcttcaatttttctaaggtctatgtgggtgaggagcttggcgatctaaatgttggagggggggctttgccaaatgctgatgtaagtattggtaatgatacaacacttacgtttgatatcgcctattttgttagctcaaatatagcggtggatttttttgttggggtgccagctagggctaaatttcaaggtgagaaatcaatctcctcgctgggaagagtcagtgaagttgattacggccctgcaattctttcgcttcaatatcattacgatagctttgagcgactttatccatatgttggggttggtgttggtcgggtgctattttttgataaaaccgacggtgctttgagttcgtttgatattaaggataaatgggcgcctgcttttcaggttggccttagatatgaccttggtaactcatggatgctaaattcagatgtgcgttatattcctttcaaaacggacgtcacaggtactcttggcccggttcctgtttctactaaaattgaggttgatcctttcattctcagtcttggtgcgtcatatgttttctaaggtaccctcgagtctggtaaagaaaccgctgctgcgaaatttgaacgccagcacatggactcgtctactagcgcagcttaattaacctaggctgctgccaccgctgagcaataactagcataaccccttggggcctctaaacgggtcttgaggggttttttgctgaaacctcaggcatttgagaagcacacggtcacactgcttccggtagtcaataaaccggtaaaccagcaatagacataagcggctatttaacgaccctgccctgaaccgacgaccgggtcatcgtggccggatcttgcggcccctcggcttgaacgaattgttagacattatttgccgactaccttggtgatctcgcctttcacgtagtggacaaattcttccaactgatctgcgcgcgaggccaagcgatcttcttcttgtccaagataagcctgtctagcttcaagtatgacgggctgatactgggccggcaggcgctccattgcccagtcggcagcgacatccttcggcgcgattttgccggttactgcgctgtaccaaatgcgggacaacgtaagcactacatttcgctcatcgccagcccagtcgggcggcgagttccatagcgttaaggtttcatttagcgcctcaaatagatcctgttcaggaaccggatcaaagagttcctccgccgctggacctaccaaggcaacgctatgttctcttgcttttgtcagcaagatagccagatcaatgtcgatcgtggctggctcgaagatacctgcaagaatgtcattgcgctgccattctccaaattgcagttcgcgcttagctggataacgccacggaatgatgtcgtcgtgcacaacaatggtgacttctacagcgcggagaatctcgctctctccaggggaagccgaagtttccaaaaggtcgttgatcaaagctcgccgcgttgtttcatcaagccttacggtcaccgtaaccagcaaatcaatatcactgtgtggcttcaggccgccatccactgcggagccgtacaaatgtacggccagcaacgtcggttcgagatggcgctcgatgacgccaactacctctgatagttgagtcgatacttcggcgatcaccgcttccctcatactcttcctttttcaatattattgaagcatttatcagggttattgtctcatgagcggatacatatttgaatgtatttagaaaaataaacaaatagctagctcactcggtcgctacgctccgggcgtgagactgcggcgggcgctgcggacacatacaaagttacccacagattccgtggataagcaggggactaacatgtgaggcaaaacagcagggccgcgccggtggcgtttttccataggctccgccctcctgccagagttcacataaacagacgcttttccggtgcatctgtgggagccgtgaggctcaaccatgaatctgacagtacgggcgaaacccgacaggacttaaagatccccaccgtttccggcgggtcgctccctcttgcgctctcctgttccgaccctgccgtttaccggatacctgttccgcctttctcccttacgggaagtgtggcgctttctcatagctcacacactggtatctcggctcggtgtaggtcgttcgctccaagctgggctgtaagcaagaactccccgttcagcccgactgctgcgccttatccggtaactgttcacttgagtccaacccggaaaagcacggtaaaacgccactggcagcagccattggtaactgggagttcgcagaggatttgtttagctaaacacgcggttgctcttgaagtgtgcgccaaagtccggctacactggaaggacagatttggttgctgtgctctgcgaaagccagttaccacggttaagcagttccccaactgacttaaccttcgatcaaaccacctccccaggtggttttttcgtttacagggcaaaagattacgcgcagaaaaaaaggatctcaagaagatcctttgatcttttctactgaaccgctctagatttcagtgcaatttatctcttcaaatgtagcacctgaagtcagccccatacgatataagttgtaattctcatgttagtcatgccccgcgcccaccggaaggagctgactgggttgaaggctctcaagggcatcggtcgagatcccggtgcctaatgagtgagctaacttacattaattgcgttgcgctcactgcccgctttccagtcgggaaacctgtcgtgccagctgcattaatgaatcggccaacgcgcggggagaggcggtttgcgtattgggcgccagggtggtttttcttttcaccagtgagacgggcaacagctgattgcccttcaccgcctggccctgagagagttgcagcaagcggtccacgctggtttgccccagcaggcgaaaatcctgtttgatggtggttaacggcgggatataacatgagctgtcttcggtatcgtcgtatcccactaccgagatgtccgcaccaacgcgcagcccggactcggtaatggcgcgcattgcgcccagcgccatctgatcgttggcaaccagcatcgcagtgggaacgatgccctcattcagcatttgcatggtttgttgaaaaccggacatggcactccagtcgccttcccgttccgctatcggctgaatttgattgcgagtgagatatttatgccagccagccagacgcagacgcgccgagacagaacttaatgggcccgctaacagcgcgatttgctggtgacccaatgcgaccagatgctccacgcccagtcgcgtaccgtcttcatgggagaaaataatactgttgatgggtgtctggtcagagacatcaagaaataacgccggaacattagtgcaggcagcttccacagcaatggcatcctggtcatccagcggatagttaatgatcagcccactgacgcgttgcgcgagaagattgtgcaccgccgctttacaggcttcgacgccgcttcgttctaccatcgacaccaccacgctggcacccagttgatcggcgcgagatttaatcgccgcgacaatttgcgacggcgcgtgcagggccagactggaggtggcaacgccaatcagcaacgactgtttgcccgccagttgttgtgccacgcggttgggaatgtaattcagctccgccatcgccgcttccactttttcccgcgttttcgcagaaacgtggctggcctggttcaccacgcgggaaacggtctgataagagacaccggcatactctgcgacatcgtataacgttactggtttcacattcaccaccctgaattgactctcttccgggcgctatcatgccataccgcgaaaggttttgcgccattcgatggtgtccgggatctcgacgctctcccttatgcgactcctgcgtttagggaaagagcatttgtcagaatatttaagggcgcctgtcactttgcttgatatatgagaattatttaaccttataaatgagaaaaaagcaacgcactttaaataagatacgttgctttttcgattgatgaacacctataattaaactattcatctattatttatgattttttgtatatacaatatttctagtttgttaaagagaattaagaaaataaatctcgaaaataataaagggaaaatcagtttttgatatcaaaattatacatgtcaacgataatacaaaatataatacaaactataagatgttatcagtatttattatgcatttagaataccttttgtgtcgcccttattcgactccctatagaagttcctattctctagaaagtataggaacttcccttcattttggatccaattgtgagcggataacaattacgagcttcatgcacagtgatcgacgctgttgacaattaatcatcggctcgtataatgtgtggatgtggaattgtgagcgctcacaattccacaacggtttccctctagaaataattttgtttaacaggaggtaaaacatatgttaacggcatgtatatcatttggggttgcgatgacgacgaacacgcattttagaggtgaagaattgaagaaggtttggcttaaccgttatcccgcggacgttccgacggagatcaaccctgaccgttatcaatctctggtagatatgtttgagcagtcggtcgcgcgctacgccgatcaacctgcgtttgtgaatatgggggaggtaatgaccttccgcaagctggaagaacgcagtcgcgcgtttgccgcttatttgcaacaagggttggggctgaagaaaggcgatcgcgttgcgttgatgatgcctaatttattgcaatatccggtggcgctgtttggcattttgcgtgccgggatgatcgtcgtaaacgttaacccgttgtataccccgcgtgagcttgagcatcagcttaacgatagcggcgcatcggcgattgttatcgtgtctaactttgctcacacactggaaaaagtggttgataaaaccgccgttcagcacgtaattctgacccgtatgggcgatcagctatctacggcaaaaggcacggtagtcaatttcgttgttaaatacatcaagcgtttggtgccgaaataccatctgccagatgccatttcatttcgtagcgcactgcataacggctaccggatgcagtacgtcaaacccgaactggtgccggaagatttagcttttctgcaatacaccggcggcaccactggtgtggcgaaaggcgcgatgctgactcaccgcaatatgctggcgaacctggaacaggttaacgcgacctatggtccgctgttgcatccgggcaaagagctggtggtgacggcgctgccgctgtatcacatttttgccctgaccattaactgcctgctgtttatcgaactgggtgggcagaacctgcttatcactaacccgcgcgatattccagggttggtaaaagagttagcgaaatatccgtttaccgctatcacgggcgttaacaccttgttcaatgcgttgctgaacaataaagagttccagcagctggatttctccagtctgcatctttccgcaggcggtgggatgccagtgcagcaagtggtggcagagcgttgggtgaaactgaccggacagtatctgctggaaggctatggccttaccgagtgtgcgccgctggtcagcgttaacccatatgatattgattatcatagtggtagcatcggtttgccggtgccgtcgacggaagccaaactggtggatgatgatgataatgaagtaccaccaggtcaaccgggtgagctttgtgtcaaaggaccgcaggtgatgctgggttactggcagcgtcccgatgctaccgatgaaatcatcaaaaatggctggttacacaccggcgacatcgcggtaatggatgaagaaggattcctgcgcattgtcgatcgtaaaaaagacatgattctggtttccggttttaacgtctatcccaacgagattgaagatgtcgtcatgcagcatcctggcgtacaggaagtcgcggctgttggcgtaccttccggctccagtggtgaagcggtgaaaatcttcgtagtgaaaaaagatccatcgcttaccgaagagtcactggtgactttttgccgccgtcagctcacgggatacaaagtaccgaagctggtggagtttcgtgatgagttaccgaaatctaacgtcggaaaaattttgcgacgagaattacgtgacgaagcgcgcggcaaagtggacaataaagcctgagcgttaagtctgaggagatccacgctatgcgcccattacatccgattgattttatattcctgtcactagaaaaaagacaacagcctatgcatgtaggtggtttatttttgtttcagattcctgataacgccccagacacctttattcaagatctggtgaatgatatccggatatcaaaatcaatccctgttccaccattcaacaataaactgaatgggcttttttgggatgaagatgaagagtttgatttagatcatcattttcgtcatattgcactgcctcatcctggtcgtattcgtgaattgcttatttatatttcacaagagcacagtacgctgctagatcgggcaaagcccttgtggacctgcaatattattgaaggaattgaaggcaatcgttttgccatgtacttcaaaattcaccatgcgatggtcgatggcgttgctggtatgcggttaattgaaaaatcactctcccatgatgtaacagaaaaaagtatcgtgccaccttggtgtgttgagggaaaacgtgcaaagcgcttaagagaacctaaaacaggtaaaattaagaaaatcatgtctggtattaagagtcagcttcaggcgacacccacagtcattcaagagctttctcagacagtatttaaagatattggacgtaatcctgatcatgtttcaagctttcaggcgccttgttctattttgaatcagcgtgtgagctcatcgcgacgttttgcagcacagtcttttgacctagatcgttttcgtaatattgccaaatcgttgaatgtgaccattaatgatgttgtactagcggtatgttctggtgcattacgtgcgtatttgatgagtcataatagtttgccttcaaaaccattaattgccatggttccagcctctattcgcaatgacgattcagatgtcagcaaccgtattacgatgattctggcaaatttggcaacccacaaagatgatcctttacaacgtcttgaaattatccgccgtagtgttcaaaactcaaagcaacgcttcaaacgtatgaccagcgatcagattctaaattatagtgctgtcgtatatggccctgcaggactcaacataatttctggcatgatgccaaaacgccaagccttcaatctggttatttccaatgtgcctggcccaagagagccactttactggaatggtgccaaacttgatgcactctacccagcttcaattgtattagacggtcaagcattgaatattacaatgaccagttatttagataaacttgaagttggtttgattgcatgccgtaatgcattgccaagaatgcagaatttactgacacatttagaagaagaaattcaactatttgaaggcgtaattgcaaagcaggaagatattaaaacagccaattaaaaacaataaacttgattttttaatttatcagataaaactaaagggctaaattagccctttagtttttaacagtacgacactgtttaagtaattgatgacacacatgatgaaccattgcagtcgtggcagatctcaattggatatcggccgg

SEQ ID NO: 29 - DNA, 693 bp, Pseudomonas putida
  CDS (1)..(693)
atgaatccgcctattttaaaaaaactcgctatgtcgatattagcaactagttttgtgttgggtggggccagtgcgtggtcaggtgaaatctattcgactgaaactgctggctacaatcagggcgactgggttgctagctttaatatgtctaaagtttatgtagacgagacgctaggctccctaaatgtaggtggggctactgtacccaatgctgctgtaagcatcggtaatgatacaacagtttcttttgatatttcctattttattagtaacaatgtagctttggattttttcgtcgggattccagctaaagctaagtttcaaggtgaaaaatccatctctgcgctgggaagagtcagtgaagttgattatggccctgcaattttgtcacttcagtatcattttgataattttgagcgactttatccatatgtcggactaggtgtcggtcgagtgtttttcttcgacaaaactgatggtgccttgacttcatttgatatcaaagataaatgggcgcctgctgttcaggtcggccttagatatgattttggtaactcatggatgttaaattcagatgtgcgctatattcctttcaaaacagatgtttctggtacacttggggctgcacctgtttctaccaagattgagattgatcctttcattctgagtcttggagcatcatataagttctga

SEQ ID NO: 30 - protein, 230 aa, Pseudomonas putida
MNPPILKKLAMSILATSFVLGGASAWSGEIYSTETAGYNQGDWVASFNMSKVYVDETLGSLNVGGATVPNAAVSIGNDTTVSFDISYFISNNVALDFFVGIPAKAKFQGEKSISALGRVSEVDYGPAILSLQYHFDNFERLYPYVGLGVGRVFFFDKTDGALTSFDIKDKWAPAVQVGLRYDFGNSWMLNSDVRYIPFKTDVSGTLGAAPVSTKIEIDPFILSLGASYKF

SEQ ID NO: 31 - protein, 246 aa, Marinobacter aquaeolei VT8
MCYEKLQFYLKPICFNTKKDNKKMKPKIISKVSLVAFLLLSLAASLANAQSEPVYSRGDWVVGLNATRVLTDEDLRSASAGGAPVPNSNLSINNDTTVSFDVSYFLSNQLAFNIFGGIPASADLQGEESLSGLFLGQTDYGPVILSLQYHVLTGSNFSPYFGAGVGRILFLDEKDRALTDFDVEDTWAPAIQAGFRWRIHNNWSANFDVRYAPFKADITGNLGPAPVQAEVEVDPTIVSIGVAYRF

SEQ ID NO: 32 - protein, 228 aa, Oceanicaulis alexandrii HTCC2633
MKQSNVKSKGPFASKFVLITMIGGFSSFSVANAEPLYSKGDWLFGLNAAKVFTNETLDSISAGGAPIPGAGVNITDDTTLSFDVSYFLNSSVALNFFGGLPASANLAGSGSLAGLPVGETEYGPAVLSLQYHFSTNSSVSPYVGAGIARILFLEEQGDALADFDLKDAWAPAVQVGMRYQMSDNWFANADIRYTPFETDISGTLGGAPVRGKISVDPTILNIGIAYRF

SEQ ID NO: 33 - protein, 227 aa, Caulobacter sp. K31
MRKNGAYMYARLAQYATALAVLSVFPQAALAQNSEGFKLWAVSLNATRVFVDEDAPDITLAGGPVPGSNVRIGDATSATIDIGYFFTPNVAGNLFLGVPATAQIDGAGSLEPLGTLAKVNYGPIILSAQYHFNNLGKVHPYLGVGVGRIVFLNERDRALLNFSIDDSWAPAAQVGVRYELGAEWMLNADVRYVPFSTHATGSLGGAPVRTRLDIDPILTSAGVTYRF

SEQ ID NO: 34 - DNA, 112 bp, Artificial Sequence
  Promoter
ggcagtgagcgcaacgcaattaatgtaagttagctcactcattaggcaccccaggcttgacactttatgcttccggctcgtataatgtgtggaattgtgagcggataacaat

SEQ ID NO: 35 - DNA, 984 bp, Cocos nucifera
  CDS (1)..(984)
ttgccagactggagcatgttgttggccgctattcgtacgatcttttccgcagccgaaaaacagtggaccctgctggatagcaagaaacgcggtgcggatgcagttgcggacgcgtctggcgtgggcaagatggtgaaaaacggtctggtctaccgtcagaatttcagcatccgtagctatgagattggtgtggacaagcgtgcgagcgttgaggctctgatgaatcattttcaagaaacgagcttgaatcactgcaaatgcatcggtctgatgcatggcggttttggttgcaccccggaaatgacgcgtcgtaatctgatctgggtcgttgccaagatgctggttcacgtggagcgttatccgtggtggggtgacgtagtgcagattaacacctggattagcagcagcggtaagaacggcatgggtcgcgactggcacgtgcacgactgtcagacgggcctgccgattatgcgtggcacctctgtgtgggtcatgatggataaacacactcgccgtctgagcaagctgccggaagaggttcgcgcagaaatcaccccgttcttcagcgaacgcgacgcggtcctggatgataacggccgtaaactgccgaaatttgacgatgatagcgcggcacacgtccgccgtggtttgacccctcgttggcatgatttcgacgtcaatcagcatgtcaacaacgtgaaatacgtcggttggattctggagagcgttccggtttggatgctggacggttacgaggttgccactatgtctctggaatatcgtcgcgagtgtcgtatggatagcgtggttcagtccctgaccgcggttagctcggatcacgcggacggcagcccgatcgtttgtcaacacctgctgcgcctggaagatggtacggagatcgtgcgtggtcaaaccgagtggcgtccgaagcaacaagcacgcgacctgggcaatatgggtttgcatccgaccgagtccaagtaa

SEQ ID NO: 36 - protein, 327 aa, Cocos nucifera
LPDWSMLLAAIRTIFSAAEKQWTLLDSKKRGADAVADASGVGKMVKNGLVYRQNFSIRSYEIGVDKRASVEALMNHFQETSLNHCKCIGLMHGGFGCTPEMTRRNLIWVVAKMLVHVERYPWWGDVVQINTWISSSGKNGMGRDWHVHDCQTGLPIMRGTSVWVMMDKHTRRLSKLPEEVRAEITPFFSERDAVLDDNGRKLPKFDDDSAAHVRRGLTPRWHDFDVNQHVNNVKYVGWILESVPVWMLDGYEVATMSLEYRRECRMDSVVQSLTAVSSDHADGSPIVCQHLLRLEDGTEIVRGQTEWRPKQQARDLGNMGLHPTESK

SEQ ID NO: 37 - DNA, 906 bp, Umbellularia californica
  CDS (1)..(906)
atgactctagagtggaaaccgaaaccaaaactgcctcaactgctggatgatcacttcggtctgcacggtctggtgtttcgtcgtactttcgcaattcgttcttatgaagtgggtccagatcgttctacctccatcctggccgtcatgaaccacatgcaggaagccaccctgaatcacgcgaaatctgttggtatcctgggtgatggtttcggcactactctggaaatgtctaaacgtgacctgatgtgggtagtgcgtcgcacccacgtagcagtagagcgctaccctacttggggtgacactgtggaagtcgagtgttggattggcgcgtccggtaacaatggtatgcgtcgcgattttctggtccgtgactgtaaaacgggcgaaatcctgacgcgttgcacctccctgagcgttctgatgaacacccgcactcgtcgcctgtctaccatcccggacgaagtgcgcggtgagatcggtcctgctttcatcgataacgtggcagttaaagacgacgaaatcaagaaactgcaaaaactgaacgactccaccgcggactacatccagggcggtctgactccgcgctggaacgacctggatgttaatcagcatgtgaacaacctgaaatacgttgcttgggtcttcgagactgtgccggacagcattttcgaaagccatcacatttcctcttttactctggagtaccgtcgcgaatgtactcgcgactccgttctgcgcagcctgaccaccgtaagcggcggttctagcgaggcaggtctggtctgcgaccatctgctgcaactggaaggcggctccgaagtcctgcgtgcgcgtacggagtggcgtccaaagctgacggattctttccgcggcatctccgtaattccggcggaacctcgtgtttaa

SEQ ID NO: 38 - protein, 301 aa, Umbellularia californica
MTLEWKPKPKLPQLLDDHFGLHGLVFRRTFAIRSYEVGPDRSTSILAVMNHMQEATLNHAKSVGILGDGFGTTLEMSKRDLMWVVRRTHVAVERYPTWGDTVEVECWIGASGNNGMRRDFLVRDCKTGEILTRCTSLSVLMNTRTRRLSTIPDEVRGEIGPAFIDNVAVKDDEIKKLQKLNDSTADYIQGGLTPRWNDLDVNQHVNNLKYVAWVFETVPDSIFESHHISSFTLEYRRECTRDSVLRSLTTVSGGSSEAGLVCDHLLQLEGGSEVLRARTEWRPKLTDSFRGISVIPAEPRV

SEQ ID NO: 39 - DNA, 159 bp, Artificial Sequence
  promoter
ggatccaattgtgagcggataacaattacgagcttcatgcacagtgatcgacgctgttgacaattaatcatcggctcgtataatgtgtggatgtggaattgtgagcgctcacaattccacaacggtttccctctagaaataattttgtttaacaggagg

SEQ ID NO: 40 - DNA, 4961 bp, Artificial Sequence
  vector
accaatgcttaatcagtgaggcacctatctcagcgatctgtctatttcgttcatccatagttgcctgactccccgtcgtgtagataactacgatacgggagggcttaccatctggccccagcgctgcgatgataccgcgagaaccacgctcaccggctccggatttatcagcaataaaccagccagccggaagggccgagcgcagaagtggtcctgcaactttatccgcctccatccagtctattaattgttgccgggaagctagagtaagtagttcgccagttaatagtttgcgcaacgttgttgccatcgctacaggcatcgtggtgtcacgctcgtcgtttggtatggcttcattcagctccggttcccaacgatcaaggcgagttacatgatcccccatgttgtgcaaaaaagcggttagctccttcggtcctccgatcgttgtcagaagtaagttggccgcagtgttatcactcatggttatggcagcactgcataattctcttactgtcatgccatccgtaagatgcttttctgtgactggtgagtactcaaccaagtcattctgagaatagtgtatgcggcgaccgagttgctcttgcccggcgtcaatacgggataataccgcgccacatagcagaactttaaaagtgctcatcattggaaaacgttcttcggggcgaaaactctcaaggatcttaccgctgttgagatccagttcgatgtaacccactcgtgcacccaactgatcttcagcatcttttactttcaccagcgtttctgggtgagcaaaaacaggaaggcaaaatgccgcaaaaaagggaataagggcgacacggaaatgttgaatactcatattcttcctttttcaatattattgaagcatttatcagggttattgtctcatgagcggatacatatttgaatgtatttagaaaaataaacaaataggggtcagtgttacaaccaattaaccaattctgaacattatcgcgagcccatttatacctgaatatggctcataacaccccttgtttgcctggcggcagtagcgcggtggtcccacctgaccccatgccgaactcagaagtgaaacgccgtagcgccgatggtagtgtggggactccccatgcgagagtagggaactgccaggcatcaaataaaacgaaaggctcagtcgaaagactgggcctttcgcccgggctaattatggggtgtcgccctttacacgtacttagtcgctgaaggatccaattgtgagcggataacaattacgagcttcatgcacagtgatcgacgctgttgacaattaatcatcggctcgtataatgtgtggatgtggaattgtgagcgctcacaattccacaacggtttccctctagaaataattttgtttaacaggaggtaaaacatttgccagactggagcatgttgttggccgctattcgtacgatcttttccgcagccgaaaaacagtggaccctgctggatagcaagaaacgcggtgcggatgcagttgcggacgcgtctggcgtgggcaagatggtgaaaaacggtctggtctaccgtcagaatttcagcatccgtagctatgagattggtgtggacaagcgtgcgagcgttgaggctctgatgaatcattttcaagaaacgagcttgaatcactgcaaatgcatcggtctgatgcatggcggttttggttgcaccccggaaatgacgcgtcgtaatctgatctgggtcgttgccaagatgctggttcacgtggagcgttatccgtggtggggtgacgtagtgcagattaacacctggattagcagcagcggtaagaacggcatgggtcgcgactggcacgtgcacgactgtcagacgggcctgccgattatgcgtggcacctctgtgtgggtcatgatggataaacacactcgccgtctgagcaagctgccggaagaggttcgcgcagaaatcaccccgttcttcagcgaacgcgacgcggtcctggatgataacggccgtaaactgccgaaatttgacgatgatagcgcggcacacgtccgccgtggtttgacccctcgttggcatgatttcgacgtcaatcagcatgtcaacaacgtgaaatacgtcggttggattctggagagcgttccggtttggatgctggacggttacgaggttgccactatgtctctggaatatcgtcgcgagtgtcgtatggatagcgtggttcagtccctgaccgcggttagctcggatcacgcggacggcagcccgatcgtttgtcaacacctgctgcgcctggaagatggtacggagatcgtgcgtggtcaaaccgagtggcgtccgaagcaacaagcacgcgacctgggcaatatgggtttgcatccgaccgagtccaagtaatagtcaaaagcctccggtcggaggcttttgactttctgcttactgaatttgcggccgccgtcaataagggcgacacaaaaggtattctaaatgcataataaatactgataacatcttatagtttgtattatattttgtattatcgttgacatgtataattttgatatcaaaaactgattttccctttattattttcgagatttattttcttaattctctttaacaaactagaaatattgtatatacaaaaaatcataaataatagatgaatagtttaattataggtgttcatcaatcgaaaaagcaacgtatcttatttaaagtgcgttgcttttttctcatttataaggttaaataattctcatatatcaagcaaagtgacaggcgcccttaaatattctgacaaatgctctttccctaaactccccccataaaaaaacccgccgaagcgggtttttacgttatttgcggattaacgattactcgttatcagaaccgcccaggatgcctggcagttccctactctcgccgctgcgctcggtcgttcggctgcgggacctcagcgctagcggagtgtatactggcttactatgttggcactgatgagggtgtcagtgaagtgcttcatgtggcaggagaaaaaaggctgcaccggtgcgtcagcagaatatgtgatacaggatatattccgcttcctcgctcactgactcgctacgctcggtcgttcgactgcggcgagcggaaatggcttacgaacggggcggagatttcctggaagatgccaggaagatacttaacagggaagtgagagggccgcggcaaagccgtttttccataggctccgcccccctgacaagcatcacgaaatctgacgctcaaatcagtggtggcgaaacccgacaggactataaagataccaggcgtttccccctggcggctccctcgtgcgctctcctgttcctgcctttcggtttaccggtgtcattccgctgttatggccgcgtttgtctcattccacgcctgacactcagttccgggtaggcagttcgctccaagctggactgtatgcacgaaccccccgttcagtccgaccgctgcgccttatccggtaactatcgtcttgagtccaacccggaaagacatgcaaaagcaccactggcagcagccactggtaattgatttagaggagttagtcttgaagtcatgcgccggttaaggctaaactgaaaggacaagttttggtgactgcgctcctccaagccagttacctcggttcaaagagttggtagctcagagaaccttcgaaaaaccgccctgcaaggcggttttttcgttttcagagcaagagattacgcgcagaccaaaacgatctcaagaagatcatcttattaatcactgcccgctttccagtcgggaaacctgtcgtgccagctgcattaatgaatcggccaacgcgcggggagaggcggtttgcgtattgggcgccagggtggtttttcttttcaccagtgagactggcaacagctgattgcccttcaccgcctggccctgagagagttgcagcaagcggtccacgctggtttgccccagcaggcgaaaatcctgtttgatggtggttaacggcgggatataacatgagctatcttcggtatcgtcgtatcccactaccgagatatccgcaccaacgcgcagcccggactcggtaatggcgcgcattgcgcccagcgccatctgatcgttggcaaccagcatcgcagtgggaacgatgccctcattcagcatttgcatggtttgttgaaaaccggacatggcactccagtcgccttcccgttccgctatcggctgaatttgattgcgagtgagatatttatgccagccagccagacgcagacgcgccgagacagaacttaatgggcccgctaacagcgcgatttgctggtgacccaatgcgaccagatgctccacgcccagtcgcgtaccgtcctcatgggagaaaataatactgttgatgggtgtctggtcagagacatcaagaaataacgccggaacattagtgcaggcagcttccacagcaatggcatcctggtcatccagcggatagttaatgatcagcccactgacgcgttgcgcgagaagattgtgcaccgccgctttacaggcttcgacgccgcttcgttctaccatcgacaccaccacgctggcacccagttgatcggcgcgagatttaatcgccgcgacaatttgcgacggcgcgtgcagggccagactggaggtggcaacgccaatcagcaacgactgtttgcccgccagttgttgtgccacgcggttgggaatgtaattcagctccgccatcgccgcttccactttttcccgcgttttcgcagaaacgtggctggcctggttcaccacgcgggaaacggtctgataagagacaccggcatactctgcgacatcgtataacgttactggtttcatattcaccaccctgaattgactctcttccgggcgctatcatgccataccgcgaaaggttttgcgccattcgatggcgcgccgctttt

SEQ ID NO: 41 - DNA, 4977 bp, Artificial Sequence
  vector
accaatgcttaatcagtgaggcacctatctcagcgatctgtctatttcgttcatccatagttgcctgactccccgtcgtgtagataactacgatacgggagggcttaccatctggccccagcgctgcgatgataccgcgagaaccacgctcaccggctccggatttatcagcaataaaccagccagccggaagggccgagcgcagaagtggtcctgcaactttatccgcctccatccagtctattaattgttgccgggaagctagagtaagtagttcgccagttaatagtttgcgcaacgttgttgccatcgctacaggcatcgtggtgtcacgctcgtcgtttggtatggcttcattcagctccggttcccaacgatcaaggcgagttacatgatcccccatgttgtgcaaaaaagcggttagctccttcggtcctccgatcgttgtcagaagtaagttggccgcagtgttatcactcatggttatggcagcactgcataattctcttactgtcatgccatccgtaagatgcttttctgtgactggtgagtactcaaccaagtcattctgagaatagtgtatgcggcgaccgagttgctcttgcccggcgtcaatacgggataataccgcgccacatagcagaactttaaaagtgctcatcattggaaaacgttcttcggggcgaaaactctcaaggatcttaccgctgttgagatccagttcgatgtaacccactcgtgcacccaactgatcttcagcatcttttactttcaccagcgtttctgggtgagcaaaaacaggaaggcaaaatgccgcaaaaaagggaataagggcgacacggaaatgttgaatactcatattcttcctttttcaatattattgaagcatttatcagggttattgtctcatgagcggatacatatttgaatgtatttagaaaaataaacaaataggggtcagtgttacaaccaattaaccaattctgaacattatcgcgagcccatttatacctgaatatggctcataacaccccttgtttgcctggcggcagtagcgcggtggtcccacctgaccccatgccgaactcagaagtgaaacgccgtagcgccgatggtagtgtggggactccccatgcgagagtagggaactgccaggcatcaaataaaacgaaaggctcagtcgaaagactgggcctttcgcccgggctaattatggggtgtcgcccttattcgactctatagtgaagttcctattctctagaaagtataggaacttctgaagtgggggcggccgcaaattcagtaagcagaaagtcaaaagcctccgaccggaggcttttgactaaagcttaaacacgaggttccgccggaattacggagatgccgcggaaagaatccgtcagctttggacgccactccgtacgcgcacgcaggacttcggagccgccttccagttgcagcagatggtcgcagaccagacctgcctcgctagaaccgccgcttacggtggtcaggctgcgcagaacggagtcgcgagtacattcgcgacggtactccagagtaaaagaggaaatgtgatggctttcgaaaatgctgtccggcacagtctcgaagacccaagcaacgtatttcaggttgttcacatgctgattaacatccaggtcgttccagcgcggagtcagaccgccctggatgtagtccgcggtggagtcgttcagtttttgcagtttcttgatttcgtcgtctttaactgccacgttatcgatgaaagcaggaccgatctcaccgcgcacttcgtccgggatggtagacaggcgacgagtgcgggtgttcatcagaacgctcagggaggtgcaacgcgtcaggatttcgcccgttttacagtcacggaccagaaaatcgcgacgcataccattgttaccggacgcgccaatccaacactcgacttccacagtgtcaccccaagtagggtagcgctctactgctacgtgggtgcgacgcactacccacatcaggtcacgtttagacatttccagagtagtgccgaaaccatcacccaggataccaacagatttcgcgtgattcagggtggcttcctgcatgtggttcatgacggccaggatggaggtagaacgatctggacccacttcataagaacgaattgcgaaagtacgacgaaacaccagaccgtgcagaccgaagtgatcatccagcagttgaggcagttttggtttcggtttccactctagagtcattttataatcctccttgtaaacaaaattatttctagagggaaaccgttgtggaattgtgagcgctcacaattccacatccacacattatacgagccgatgattaattgtcaacagcgtcgatcactgtgcatgaagctcgtaattgttatccgctcacaattggatccaaaatgaagggaagttcctatactttctagagaataggaacttctatagggagtcgaataagggcgacacaaaaggtattctaaatgcataataaatactgataacatcttatagtttgtattatattttgtattatcgttgacatgtataattttgatatcaaaaactgattttccctttattattttcgagatttattttcttaattctctttaacaaactagaaatattgtatatacaaaaaatcataaataatagatgaatagtttaattataggtgttcatcaatcgaaaaagcaacgtatcttatttaaagtgcgttgcttttttctcatttataaggttaaataattctcatatatcaagcaaagtgacaggcgcccttaaatattctgacaaatgctctttccctaaactccccccataaaaaaacccgccgaagcgggtttttacgttatttgcggattaacgattactcgttatcagaaccgcccaggatgcctggcagttccctactctcgccgctgcgctcggtcgttcggctgcgggacctcagcgctagcggagtgtatactggcttactatgttggcactgatgagggtgtcagtgaagtgcttcatgtggcaggagaaaaaaggctgcaccggtgcgtcagcagaatatgtgatacaggatatattccgcttcctcgctcactgactcgctacgctcggtcgttcgactgcggcgagcggaaatggcttacgaacggggcggagatttcctggaagatgccaggaagatacttaacagggaagtgagagggccgcggcaaagccgtttttccataggctccgcccccctgacaagcatcacgaaatctgacgctcaaatcagtggtggcgaaacccgacaggactataaagataccaggcgtttccccctggcggctccctcgtgcgctctcctgttcctgcctttcggtttaccggtgtcattccgctgttatggccgcgtttgtctcattccacgcctgacactcagttccgggtaggcagttcgctccaagctggactgtatgcacgaaccccccgttcagtccgaccgctgcgccttatccggtaactatcgtcttgagtccaacccggaaagacatgcaaaagcaccactggcagcagccactggtaattgatttagaggagttagtcttgaagtcatgcgccggttaaggctaaactgaaaggacaagttttggtgactgcgctcctccaagccagttacctcggttcaaagagttggtagctcagagaaccttcgaaaaaccgccctgcaaggcggttttttcgttttcagagcaagagattacgcgcagaccaaaacgatctcaagaagatcatcttattaatcactgcccgctttccagtcgggaaacctgtcgtgccagctgcattaatgaatcggccaacgcgcggggagaggcggtttgcgtattgggcgccagggtggtttttcttttcaccagtgagactggcaacagctgattgcccttcaccgcctggccctgagagagttgcagcaagcggtccacgctggtttgccccagcaggcgaaaatcctgtttgatggtggttaacggcgggatataacatgagctatcttcggtatcgtcgtatcccactaccgagatatccgcaccaacgcgcagcccggactcggtaatggcgcgcattgcgcccagcgccatctgatcgttggcaaccagcatcgcagtgggaacgatgccctcattcagcatttgcatggtttgttgaaaaccggacatggcactccagtcgccttcccgttccgctatcggctgaatttgattgcgagtgagatatttatgccagccagccagacgcagacgcgccgagacagaacttaatgggcccgctaacagcgcgatttgctggtgacccaatgcgaccagatgctccacgcccagtcgcgtaccgtcctcatgggagaaaataatactgttgatgggtgtctggtcagagacatcaagaaataacgccggaacattagtgcaggcagcttccacagcaatggcatcctggtcatccagcggatagttaatgatcagcccactgacgcgttgcgcgagaagattgtgcaccgccgctttacaggcttcgacgccgcttcgttctaccatcgacaccaccacgctggcacccagttgatcggcgcgagatttaatcgccgcgacaatttgcgacggcgcgtgcagggccagactggaggtggcaacgccaatcagcaacgactgtttgcccgccagttgttgtgccacgcggttgggaatgtaattcagctccgccatcgccgcttccactttttcccgcgttttcgcagaaacgtggctggcctggttcaccacgcgggaaacggtctgataagagacaccggcatactctgcgacatcgtataacgttactggtttcatattcaccaccctgaattgactctcttccgggcgctatcatgccataccgcgaaaggttttgcgccattcgatggcgcgccgctttt

SEQ ID NO: 42 - DNA, 690 bp, Oceanocaulis alexandrii
  CDS (1)..(690)
atgaaacaatctaatgtaaaatccaaggggccttttgcctcgaagtttgtgttaatcacgatgatcggtggcttttcgtcgttcagcgtcgcaaatgcggaaccgctttactccaagggcgactggctttttggcctgaatgcggcgaaagtattcacgaacgaaacgttggattcaatcagcgcgggcggtgcgccaatacccggggctggtgtcaatatcaccgatgacaccacgctgagtttcgacgtttcctattttttgaattcatctgtagcgttgaacttctttggtggtttgcctgccagcgctaatcttgcagggagcggcagtttggcaggactgcctgttggagagacggaatatggccctgctgttttgtcgcttcaatatcacttttcgactaattcatccgttagcccttatgttggtgccggtatcgctcgaatcttgtttctggaagaacaaggggatgcactcgcggacttcgacttgaaagacgcctgggcgcccgctgtccaagttggaatgcgctatcaaatgagcgataattggtttgccaatgccgatatacgttacacgccattcgaaacagatatctctgggacactcggcggggcgccagtcagaggcaagatttcggtggacccaacaattctcaatatcggtattgcctaccggttttaataa

SEQ ID NO: 43 - protein, 228 aa, Oceanocaulis alexandrii; identical to SEQ ID NO: 32

SEQ ID NO: 44 - DNA, 744 bp, Marinobacter aquaeolei
  CDS (1)..(744)
ttgtgttacgaaaaattgcagttttacctaaagccaatttgttttaataccaaaaaggataataaaaaaatgaaacctaaaataattagtaaagtctcgttagtggcgttccttttactttcacttgctgcgagcctggccaacgctcaatctgagccggtttacagtagaggcgactgggtggttggactgaatgccactagagttttaaccgatgaagatttgcgatcagcctctgcggggggtgcccccgttccaaattccaacctgtctattaacaacgatacgaccgtttcattcgacgtgtcgtattttctgagtaatcagctggcatttaacatttttggcggcattcccgctagtgcggacctccagggcgaagagtctctctccggtctttttcttggtcaaacagattatggtccggtaattctttcgcttcagtatcatgtcttaacgggtagcaacttctctccgtactttggagcgggtgtaggacggattctctttttagatgagaaggatcgcgcactaaccgacttcgacgtcgaagatacatgggcccctgcgattcaggctggttttcgctggaggatacacaataactggtcggcaaattttgacgttagatatgcacccttcaaagcggatatcaccggtaacctaggcccggcccctgttcaggcagaagtggaagtggaccccactatcgtgagcatcggtgtcgcatatcgcttttaataa

SEQ ID NO: 45 - protein, 246 aa, Marinobacter aquaeolei
LCYEKLQFYLKPICFNTKKDNKKMKPKIISKVSLVAFLLLSLAASLANAQSEPVYSRGDWVVGLNATRVLTDEDLRSASAGGAPVPNSNLSINNDTTVSFDVSYFLSNQLAFNIFGGIPASADLQGEESLSGLFLGQTDYGPVILSLQYHVLTGSNFSPYFGAGVGRILFLDEKDRALTDFDVEDTWAPAIQAGFRWRIHNNWSANFDVRYAPFKADITGNLGPAPVQAEVEVDPTIVSIGVAYRF

SEQ ID NO: 46 - DNA, 687 bp, Caulobacter sp. K31
  CDS (1)..(687)
atgagaaaaaatggagcatatatgtatgcaaggcttgcgcaatacgccaccgcgctcgccgtcttgagcgtcttcccccaggctgcattggcccagaattcggaaggattcaagctgtgggccgtaagtctgaatgcaactagggtcttcgtggatgaggatgcgcccgacatcaccttggctggagggcctgttccgggctcgaatgtgaggatcggggatgccacgtcggcgaccattgatatcggatatttcttcacgcccaatgttgctggtaatttgtttctcggcgtgccggcgaccgcgcaaattgacggcgctgggtcacttgagccgctcggaactctagccaaggtcaactatggacccatcatcttgtcggcccagtaccatttcaacaatcttggcaaggttcatccctatctgggagtgggcgtcgggcggatcgtctttctgaatgagcgtgacagagctttgcttaatttcagtatcgacgacagttgggcgcctgcggctcaggtgggtgttcggtacgagcttggcgcagaatggatgctgaacgctgacgttcgatacgttcccttctccacgcacgctaccggttcactgggtggagcgcctgtccggacacgtttggacatcgacccgatcctgacgagcgccggagtgacttaccggttttagtaa

SEQ ID NO: 47 - protein, 227 aa, Caulobacter sp. K31; identical to SEQ ID NO: 33

SEQ ID NO: 48 - DNA, 35 bp, Artificial Sequence
  primer
gcttactgaatttgcctgaaccatggggcagtgag

SEQ ID NO: 49 - DNA, 37 bp, Artificial Sequence
  primer
ttctgaagtgggggcggccgcccttttgacgggtacc

SEQ ID NO: 50 - DNA, 5857 bp, Artificial Sequence
  vector
accaatgcttaatcagtgaggcacctatctcagcgatctgtctatttcgttcatccatagttgcctgactccccgtcgtgtagataactacgatacgggagggcttaccatctggccccagcgctgcgatgataccgcgagaaccacgctcaccggctccggatttatcagcaataaaccagccagccggaagggccgagcgcagaagtggtcctgcaactttatccgcctccatccagtctattaattgttgccgggaagctagagtaagtagttcgccagttaatagtttgcgcaacgttgttgccatcgctacaggcatcgtggtgtcacgctcgtcgtttggtatggcttcattcagctccggttcccaacgatcaaggcgagttacatgatcccccatgttgtgcaaaaaagcggttagctccttcggtcctccgatcgttgtcagaagtaagttggccgcagtgttatcactcatggttatggcagcactgcataattctcttactgtcatgccatccgtaagatgcttttctgtgactggtgagtactcaaccaagtcattctgagaatagtgtatgcggcgaccgagttgctcttgcccggcgtcaatacgggataataccgcgccacatagcagaactttaaaagtgctcatcattggaaaacgttcttcggggcgaaaactctcaaggatcttaccgctgttgagatccagttcgatgtaacccactcgtgcacccaactgatcttcagcatcttttactttcaccagcgtttctgggtgagcaaaaacaggaaggcaaaatgccgcaaaaaagggaataagggcgacacggaaatgttgaatactcatattcttcctttttcaatattattgaagcatttatcagggttattgtctcatgagcggatacatatttgaatgtatttagaaaaataaacaaataggggtcagtgttacaaccaattaaccaattctgaacattatcgcgagcccatttatacctgaatatggctcataacaccccttgtttgcctggcggcagtagcgcggtggtcccacctgaccccatgccgaactcagaagtgaaacgccgtagcgccgatggtagtgtggggactccccatgcgagagtagggaactgccaggcatcaaataaaacgaaaggctcagtcgaaagactgggcctttcgcccgggctaattatggggtgtcgcccttattcgactctatagtgaagttcctattctctagaaagtataggaacttctgaagtgggggcggccgcccttttgacgggtaccttattaaaaccggtaggcaataccgatattgagaattgttgggtccaccgaaatcttgcctctgactggcgccccgccgagtgtcccagagatatctgtttcgaatggcgtgtaacgtatatcggcattggcaaaccaattatcgctcatttgatagcgcattccaacttggacagcgggcgcccaggcgtctttcaagtcgaagtccgcgagtgcatccccttgttcttccagaaacaagattcgagcgataccggcaccaacataagggctaacggatgaattagtcgaaaagtgatattgaagcgacaaaacagcagggccatattccgtctctccaacaggcagtcctgccaaactgccgctccctgcaagattagcgctggcaggcaaaccaccaaagaagttcaacgctacagatgaattcaaaaaataggaaacgtcgaaactcagcgtggtgtcatcggtgatattgacaccagccccgggtattggcgcaccgcccgcgctgattgaatccaacgtttcgttcgtgaatactttcgccgcattcaggccaaaaagccagtcgcccttggagtaaagcggttccgcatttgcgacgctgaacgacgaaaagccaccgatcatcgtgattaacacaaacttcgaggcaaaaggccccttggattttacattagattgtttcatatgccactctccttggttcctagatcctgtgtgaaattgttattgttatccgctcacaattccacacattatacgagccggaagcataaagtgtcaagcctggggtgcctaatgagtgagctaacttacattaattgcgttgcgctcactgccccatggttcaggcaaattcagtaagcagaaagtcaaaagcctccgaccggaggcttttgactattaggaaacgctgttgccattagacgtcttgccggtgctaatagcaccattcgcacctgcatttttcggacgccactcggttgcaccattgacgattgcagtaccatcctccagacgcagcaggtgttgatattggctacgcacaccaactttggacgggtccatcgccgtcacgctttccaaaacgctgtcacggccgcactcgcgacgatattccagagccaggctgcacagctcctgcgtttccaggacctcggtcggcatgctctccagaatccagccaatgtatttgacgttgctgacatgttgattcacatccagatcgttccagcctggggtcaagcctttttggatgctgtcaccggtcttaaccttgaacttatggaccttcagatcgctatcctcgataaccggagagtcaacgaacagagggacgatttcctgatgcacctcgtacggcagcttgctcaggcgacgagttttctgattcatcatggcatacgcgctggtcgcacgcaccaggatttcgcccgtattgcaatcgctaatcagccagtcgcgacccataccaatcttacccagacggctgaaacgcgtgttaatctcaacggtgtcaccccaggccgggtaacggttaactttgatctgcatcttaatcaccacccaaatcaaatcacgcttacacatctccagggtgcgaccgaaaccatccaacaggataccggtagatttacagtggttcaagctggtttcctgcaggtggttcatcagggtttcgatgctcgcggtacgatccgtgccaatctcgtagctgcggatgctaaaggattgacgaaacaccaggccgtcctggaccgtgctttccagaccaaacgagtctaccagcatgtccgggcgtttggatttgcggtcgtgcatatgttttacctcctgttaaacaaaattatttctagagggaaaccgttgtggaattgtgagcgctcacaattccacatccacacattatacgagccgatgattaattgtcaacagcgtcgatcactgtgcatgaagctcgtaattgttatccgctcacaattggatccaaaatgaagggaagttcctatactttctagagaataggaacttctatagggagtcgaataagggcgacacaaaaggtattctaaatgcataataaatactgataacatcttatagtttgtattatattttgtattatcgttgacatgtataattttgatatcaaaaactgattttccctttattattttcgagatttattttcttaattctctttaacaaactagaaatattgtatatacaaaaaatcataaataatagatgaatagtttaattataggtgttcatcaatcgaaaaagcaacgtatcttatttaaagtgcgttgcttttttctcatttataaggttaaataattctcatatatcaagcaaagtgacaggcgcccttaaatattctgacaaatgctctttccctaaactccccccataaaaaaacccgccgaagcgggtttttacgttatttgcggattaacgattactcgttatcagaaccgcccaggatgcctggcagttccctactctcgccgctgcgctcggtcgttcggctgcgggacctcagcgctagcggagtgtatactggcttactatgttggcactgatgagggtgtcagtgaagtgcttcatgtggcaggagaaaaaaggctgcaccggtgcgtcagcagaatatgtgatacaggatatattccgcttcctcgctcactgactcgctacgctcggtcgttcgactgcggcgagcggaaatggcttacgaacggggcggagatttcctggaagatgccaggaagatacttaacagggaagtgagagggccgcggcaaagccgtttttccataggctccgcccccctgacaagcatcacgaaatctgacgctcaaatcagtggtggcgaaacccgacaggactataaagataccaggcgtttccccctggcggctccctcgtgcgctctcctgttcctgcctttcggtttaccggtgtcattccgctgttatggccgcgtttgtctcattccacgcctgacactcagttccgggtaggcagttcgctccaagctggactgtatgcacgaaccccccgttcagtccgaccgctgcgccttatccggtaactatcgtcttgagtccaacccggaaagacatgcaaaagcaccactggcagcagccactggtaattgatttagaggagttagtcttgaagtcatgcgccggttaaggctaaactgaaaggacaagttttggtgactgcgctcctccaagccagttacctcggttcaaagagttggtagctcagagaaccttcgaaaaaccgccctgcaaggcggttttttcgttttcagagcaagagattacgcgcagaccaaaacgatctcaagaagatcatcttattaatcactgcccgctttccagtcgggaaacctgtcgtgccagctgcattaatgaatcggccaacgcgcggggagaggcggtttgcgtattgggcgccagggtggtttttcttttcaccagtgagactggcaacagctgattgcccttcaccgcctggccctgagagagttgcagcaagcggtccacgctggtttgccccagcaggcgaaaatcctgtttgatggtggttaacggcgggatataacatgagctatcttcggtatcgtcgtatcccactaccgagatatccgcaccaacgcgcagcccggactcggtaatggcgcgcattgcgcccagcgccatctgatcgttggcaaccagcatcgcagtgggaacgatgccctcattcagcatttgcatggtttgttgaaaaccggacatggcactccagtcgccttcccgttccgctatcggctgaatttgattgcgagtgagatatttatgccagccagccagacgcagacgcgccgagacagaacttaatgggcccgctaacagcgcgatttgctggtgacccaatgcgaccagatgctccacgcccagtcgcgtaccgtcctcatgggagaaaataatactgttgatgggtgtctggtcagagacatcaagaaataacgccggaacattagtgcaggcagcttccacagcaatggcatcctggtcatccagcggatagttaatgatcagcccactgacgcgttgcgcgagaagattgtgcaccgccgctttacaggcttcgacgccgcttcgttctaccatcgacaccaccacgctggcacccagttgatcggcgcgagatttaatcgccgcgacaatttgcgacggcgcgtgcagggccagactggaggtggcaacgccaatcagcaacgactgtttgcccgccagttgttgtgccacgcggttgggaatgtaattcagctccgccatcgccgcttccactttttcccgcgttttcgcagaaacgtggctggcctggttcaccacgcgggaaacggtctgataagagacaccggcatactctgcgacatcgtataacgttactggtttcatattcaccaccctgaattgactctcttccgggcgctatcatgccataccgcgaaaggttttgcgccattcgatggcgcgccgctttt

SEQ ID NO: 51 - DNA, 5911 bp, Artificial Sequence
  vector
taaaagcggcgcgccatcgaatggcgcaaaacctttcgcggtatggcatgatagcgcccggaagagagtcaattcagggtggtgaatatgaaaccagtaacgttatacgatgtcgcagagtatgccggtgtctcttatcagaccgtttcccgcgtggtgaaccaggccagccacgtttctgcgaaaacgcgggaaaaagtggaagcggcgatggcggagctgaattacattcccaaccgcgtggcacaacaactggcgggcaaacagtcgttgctgattggcgttgccacctccagtctggccctgcacgcgccgtcgcaaattgtcgcggcgattaaatctcgcgccgatcaactgggtgccagcgtggtggtgtcgatggtagaacgaagcggcgtcgaagcctgtaaagcggcggtgcacaatcttctcgcgcaacgcgtcagtgggctgatcattaactatccgctggatgaccaggatgccattgctgtggaagctgcctgcactaatgttccggcgttatttcttgatgtctctgaccagacacccatcaacagtattattttctcccatgaggacggtacgcgactgggcgtggagcatctggtcgcattgggtcaccagcaaatcgcgctgttagcgggcccattaagttctgtctcggcgcgtctgcgtctggctggctggcataaatatctcactcgcaatcaaattcagccgatagcggaacgggaaggcgactggagtgccatgtccggttttcaacaaaccatgcaaatgctgaatgagggcatcgttcccactgcgatgctggttgccaacgatcagatggcgctgggcgcaatgcgcgccattaccgagtccgggctgcgcgttggtgcggatatctcggtagtgggatacgacgataccgaagatagctcatgttatatcccgccgttaaccaccatcaaacaggattttcgcctgctggggcaaaccagcgtggaccgcttgctgcaactctctcagggccaggcggtgaagggcaatcagctgttgccagtctcactggtgaaaagaaaaaccaccctggcgcccaatacgcaaaccgcctctccccgcgcgttggccgattcattaatgcagctggcacgacaggtttcccgactggaaagcgggcagtgattaataagatgatcttcttgagatcgttttggtctgcgcgtaatctcttgctctgaaaacgaaaaaaccgccttgcagggcggtttttcgaaggttctctgagctaccaactctttgaaccgaggtaactggcttggaggagcgcagtcaccaaaacttgtcctttcagtttagccttaaccggcgcatgacttcaagactaactcctctaaatcaattaccagtggctgctgccagtggtgcttttgcatgtctttccgggttggactcaagacgatagttaccggataaggcgcagcggtcggactgaacggggggttcgtgcatacagtccagcttggagcgaactgcctacccggaactgagtgtcaggcgtggaatgagacaaacgcggccataacagcggaatgacaccggtaaaccgaaaggcaggaacaggagagcgcacgagggagccgccagggggaaacgcctggtatctttatagtcctgtcgggtttcgccaccactgatttgagcgtcagatttcgtgatgcttgtcaggggggcggagcctatggaaaaacggctttgccgcggccctctcacttccctgttaagtatcttcctggcatcttccaggaaatctccgccccgttcgtaagccatttccgctcgccgcagtcgaacgaccgagcgtagcgagtcagtgagcgaggaagcggaatatatcctgtatcacatattctgctgacgcaccggtgcagccttttttctcctgccacatgaagcacttcactgacaccctcatcagtgccaacatagtaagccagtatacactccgctagcgctgaggtcccgcagccgaacgaccgagcgcagcggcgagagtagggaactgccaggcatcctgggcggttctgataacgagtaatcgttaatccgcaaataacgtaaaaacccgcttcggcgggtttttttatggggggagtttagggaaagagcatttgtcagaatatttaagggcgcctgtcactttgcttgatatatgagaattatttaaccttataaatgagaaaaaagcaacgcactttaaataagatacgttgctttttcgattgatgaacacctataattaaactattcatctattatttatgattttttgtatatacaatatttctagtttgttaaagagaattaagaaaataaatctcgaaaataataaagggaaaatcagtttttgatatcaaaattatacatgtcaacgataatacaaaatataatacaaactataagatgttatcagtatttattatgcatttagaataccttttgtgtcgcccttattcgactccctatagaagttcctattctctagaaagtataggaacttcccttcattttggatccaattgtgagcggataacaattacgagcttcatgcacagtgatcgacgctgttgacaattaatcatcggctcgtataatgtgtggatgtggaattgtgagcgctcacaattccacaacggtttccctctagaaataattttgtttaacaggaggtaaaacatatgcacgaccgcaaatccaaacgcccggacatgctggtagactcgtttggtctggaaagcacggtccaggacggcctggtgtttcgtcaatcctttagcatccgcagctacgagattggcacggatcgtaccgcgagcatcgaaaccctgatgaaccacctgcaggaaaccagcttgaaccactgtaaatctaccggtatcctgttggatggtttcggtcgcaccctggagatgtgtaagcgtgatttgatttgggtggtgattaagatgcagatcaaagttaaccgttacccggcctggggtgacaccgttgagattaacacgcgtttcagccgtctgggtaagattggtatgggtcgcgactggctgattagcgattgcaatacgggcgaaatcctggtgcgtgcgaccagcgcgtatgccatgatgaatcagaaaactcgtcgcctgagcaagctgccgtacgaggtgcatcaggaaatcgtccctctgttcgttgactctccggttatcgaggatagcgatctgaaggtccataagttcaaggttaagaccggtgacagcatccaaaaaggcttgaccccaggctggaacgatctggatgtgaatcaacatgtcagcaacgtcaaatacattggctggattctggagagcatgccgaccgaggtcctggaaacgcaggagctgtgcagcctggctctggaatatcgtcgcgagtgcggccgtgacagcgttttggaaagcgtgacggcgatggacccgtccaaagttggtgtgcgtagccaatatcaacacctgctgcgtctggaggatggtactgcaatcgtcaatggtgcaaccgagtggcgtccgaaaaatgcaggtgcgaatggtgctattagcaccggcaagacgtctaatggcaacagcgtttcctaatagtcaaaagcctccggtcggaggcttttgactttctgcttactgaatttgcctgaaccatggggcagtgagcgcaacgcaattaatgtaagttagctcactcattaggcaccccaggcttgacactttatgcttccggctcgtataatgtgtggaattgtgagcggataacaataacaatttcacacaggatctaggaaccaaggagagtggcatttgtgttacgaaaaattgcagttttacctaaagccaatttgttttaataccaaaaaggataataaaaaaatgaaacctaaaataattagtaaagtctcgttagtggcgttccttttactttcacttgctgcgagcctggccaacgctcaatctgagccggtttacagtagaggcgactgggtggttggactgaatgccactagagttttaaccgatgaagatttgcgatcagcctctgcggggggtgcccccgttccaaattccaacctgtctattaacaacgatacgaccgtttcattcgacgtgtcgtattttctgagtaatcagctggcatttaacatttttggcggcattcccgctagtgcggacctccagggcgaagagtctctctccggtctttttcttggtcaaacagattatggtccggtaattctttcgcttcagtatcatgtcttaacgggtagcaacttctctccgtactttggagcgggtgtaggacggattctctttttagatgagaaggatcgcgcactaaccgacttcgacgtcgaagatacatgggcccctgcgattcaggctggttttcgctggaggatacacaataactggtcggcaaattttgacgttagatatgcacccttcaaagcggatatcaccggtaacctaggcccggcccctgttcaggcagaagtggaagtggaccccactatcgtgagcatcggtgtcgcatatcgcttttaataaggtacccgtcaaaagggcggccgcccccacttcagaagttcctatactttctagagaataggaacttcactatagagtcgaataagggcgacaccccataattagcccgggcgaaaggcccagtctttcgactgagcctttcgttttatttgatgcctggcagttccctactctcgcatggggagtccccacactaccatcggcgctacggcgtttcacttctgagttcggcatggggtcaggtgggaccaccgcgctactgccgccaggcaaacaaggggtgttatgagccatattcaggtataaatgggctcgcgataatgttcagaattggttaattggttgtaacactgacccctatttgtttatttttctaaatacattcaaatatgtatccgctcatgagacaataaccctgataaatgcttcaataatattgaaaaaggaagaatatgagtattcaacatttccgtgtcgcccttattcccttttttgcggcattttgccttcctgtttttgctcacccagaaacgctggtgaaagtaaaagatgctgaagatcagttgggtgcacgagtgggttacatcgaactggatctcaacagcggtaagatccttgagagttttcgccccgaagaacgttttccaatgatgagcacttttaaagttctgctatgtggcgcggtattatcccgtattgacgccgggcaagagcaactcggtcgccgcatacactattctcagaatgacttggttgagtactcaccagtcacagaaaagcatcttacggatggcatgacagtaagagaattatgcagtgctgccataaccatgagtgataacactgcggccaacttacttctgacaacgatcggaggaccgaaggagctaaccgcttttttgcacaacatgggggatcatgtaactcgccttgatcgttgggaaccggagctgaatgaagccataccaaacgacgagcgtgacaccacgatgcctgtagcgatggcaacaacgttgcgcaaactattaactggcgaactacttactctagcttcccggcaacaattaatagactggatggaggcggataaagttgcaggaccacttctgcgctcggcccttccggctggctggtttattgctgataaatccggagccggtgagcgtggttctcgcggtatcatcgcagcgctggggccagatggtaagccctcccgtatcgtagttatctacacgacggggagtcaggcaactatggatgaacgaaatagacagatcgctgagataggtgcctcactgattaagcattgg

SEQ ID NO: 52 - DNA, 5854 bp, Artificial Sequence
  vector
accaatgcttaatcagtgaggcacctatctcagcgatctgtctatttcgttcatccatagttgcctgactccccgtcgtgtagataactacgatacgggagggcttaccatctggccccagcgctgcgatgataccgcgagaaccacgctcaccggctccggatttatcagcaataaaccagccagccggaagggccgagcgcagaagtggtcctgcaactttatccgcctccatccagtctattaattgttgccgggaagctagagtaagtagttcgccagttaatagtttgcgcaacgttgttgccatcgctacaggcatcgtggtgtcacgctcgtcgtttggtatggcttcattcagctccggttcccaacgatcaaggcgagttacatgatcccccatgttgtgcaaaaaagcggttagctccttcggtcctccgatcgttgtcagaagtaagttggccgcagtgttatcactcatggttatggcagcactgcataattctcttactgtcatgccatccgtaagatgcttttctgtgactggtgagtactcaaccaagtcattctgagaatagtgtatgcggcgaccgagttgctcttgcccggcgtcaatacgggataataccgcgccacatagcagaactttaaaagtgctcatcattggaaaacgttcttcggggcgaaaactctcaaggatcttaccgctgttgagatccagttcgatgtaacccactcgtgcacccaactgatcttcagcatcttttactttcaccagcgtttctgggtgagcaaaaacaggaaggcaaaatgccgcaaaaaagggaataagggcgacacggaaatgttgaatactcatattcttcctttttcaatattattgaagcatttatcagggttattgtctcatgagcggatacatatttgaatgtatttagaaaaataaacaaataggggtcagtgttacaaccaattaaccaattctgaacattatcgcgagcccatttatacctgaatatggctcataacaccccttgtttgcctggcggcagtagcgcggtggtcccacctgaccccatgccgaactcagaagtgaaacgccgtagcgccgatggtagtgtggggactccccatgcgagagtagggaactgccaggcatcaaataaaacgaaaggctcagtcgaaagactgggcctttcgcccgggctaattatggggtgtcgcccttattcgactctatagtgaagttcctattctctagaaagtataggaacttctgaagtgggggcggccgcccttttgacgggtaccttactaaaaccggtaagtcactccggcgctcgtcaggatcgggtcgatgtccaaacgtgtccggacaggcgctccacccagtgaaccggtagcgtgcgtggagaagggaacgtatcgaacgtcagcgttcagcatccattctgcgccaagctcgtaccgaacacccacctgagccgcaggcgcccaactgtcgtcgatactgaaattaagcaaagctctgtcacgctcattcagaaagacgatccgcccgacgcccactcccagatagggatgaaccttgccaagattgttgaaatggtactgggccgacaagatgatgggtccatagttgaccttggctagagttccgagcggctcaagtgacccagcgccgtcaatttgcgcggtcgccggcacgccgagaaacaaattaccagcaacattgggcgtgaagaaatatccgatatcaatggtcgccgacgtggcatccccgatcctcacattcgagcccggaacaggccctccagccaaggtgatgtcgggcgcatcctcatccacgaagaccctagttgcattcagacttacggcccacagcttgaatccttccgaattctgggccaatgcagcctgggggaagacgctcaagacggcgagcgcggtggcgtattgcgcaagccttgcatacatatatgctccattttttctcatatgccactctccttggttcctagatcctgtgtgaaattgttattgttatccgctcacaattccacacattatacgagccggaagcataaagtgtcaagcctggggtgcctaatgagtgagctaacttacattaattgcgttgcgctcactgccccatggttcaggcaaattcagtaagcagaaagtcaaaagcctccgaccggaggcttttgactattaggaaacgctgttgccattagacgtcttgccggtgctaatagcaccattcgcacctgcatttttcggacgccactcggttgcaccattgacgattgcagtaccatcctccagacgcagcaggtgttgatattggctacgcacaccaactttggacgggtccatcgccgtcacgctttccaaaacgctgtcacggccgcactcgcgacgatattccagagccaggctgcacagctcctgcgtttccaggacctcggtcggcatgctctccagaatccagccaatgtatttgacgttgctgacatgttgattcacatccagatcgttccagcctggggtcaagcctttttggatgctgtcaccggtcttaaccttgaacttatggaccttcagatcgctatcctcgataaccggagagtcaacgaacagagggacgatttcctgatgcacctcgtacggcagcttgctcaggcgacgagttttctgattcatcatggcatacgcgctggtcgcacgcaccaggatttcgcccgtattgcaatcgctaatcagccagtcgcgacccataccaatcttacccagacggctgaaacgcgtgttaatctcaacggtgtcaccccaggccgggtaacggttaactttgatctgcatcttaatcaccacccaaatcaaatcacgcttacacatctccagggtgcgaccgaaaccatccaacaggataccggtagatttacagtggttcaagctggtttcctgcaggtggttcatcagggtttcgatgctcgcggtacgatccgtgccaatctcgtagctgcggatgctaaaggattgacgaaacaccaggccgtcctggaccgtgctttccagaccaaacgagtctaccagcatgtccgggcgtttggatttgcggtcgtgcatatgttttacctcctgttaaacaaaattatttctagagggaaaccgttgtggaattgtgagcgctcacaattccacatccacacattatacgagccgatgattaattgtcaacagcgtcgatcactgtgcatgaagctcgtaattgttatccgctcacaattggatccaaaatgaagggaagttcctatactttctagagaataggaacttctatagggagtcgaataagggcgacacaaaaggtattctaaatgcataataaatactgataacatcttatagtttgtattatattttgtattatcgttgacatgtataattttgatatcaaaaactgattttccctttattattttcgagatttattttcttaattctctttaacaaactagaaatattgtatatacaaaaaatcataaataatagatgaatagtttaattataggtgttcatcaatcgaaaaagcaacgtatcttatttaaagtgcgttgcttttttctcatttataaggttaaataattctcatatatcaagcaaagtgacaggcgcccttaaatattctgacaaatgctctttccctaaactccccccataaaaaaacccgccgaagcgggtttttacgttatttgcggattaacgattactcgttatcagaaccgcccaggatgcctggcagttccctactctcgccgctgcgctcggtcgttcggctgcgggacctcagcgctagcggagtgtatactggcttactatgttggcactgatgagggtgtcagtgaagtgcttcatgtggcaggagaaaaaaggctgcaccggtgcgtcagcagaatatgtgatacaggatatattccgcttcctcgctcactgactcgctacgctcggtcgttcgactgcggcgagcggaaatggcttacgaacggggcggagatttcctggaagatgccaggaagatacttaacagggaagtgagagggccgcggcaaagccgtttttccataggctccgcccccctgacaagcatcacgaaatctgacgctcaaatcagtggtggcgaaacccgacaggactataaagataccaggcgtttccccctggcggctccctcgtgcgctctcctgttcctgcctttcggtttaccggtgtcattccgctgttatggccgcgtttgtctcattccacgcctgacactcagttccgggtaggcagttcgctccaagctggactgtatgcacgaaccccccgttcagtccgaccgctgcgccttatccggtaactatcgtcttgagtccaacccggaaagacatgcaaaagcaccactggcagcagccactggtaattgatttagaggagttagtcttgaagtcatgcgccggttaaggctaaactgaaaggacaagttttggtgactgcgctcctccaagccagttacctcggttcaaagagttggtagctcagagaaccttcgaaaaaccgccctgcaaggcggttttttcgttttcagagcaagagattacgcgcagaccaaaacgatctcaagaagatcatcttattaatcactgcccgctttccagtcgggaaacctgtcgtgccagctgcattaatgaatcggccaacgcgcggggagaggcggtttgcgtattgggcgccagggtggtttttcttttcaccagtgagactggcaacagctgattgcccttcaccgcctggccctgagagagttgcagcaagcggtccacgctggtttgccccagcaggcgaaaatcctgtttgatggtggttaacggcgggatataacatgagctatcttcggtatcgtcgtatcccactaccgagatatccgcaccaacgcgcagcccggactcggtaatggcgcgcattgcgcccagcgccatctgatcgttggcaaccagcatcgcagtgggaacgatgccctcattcagcatttgcatggtttgttgaaaaccggacatggcactccagtcgccttcccgttccgctatcggctgaatttgattgcgagtgagatatttatgccagccagccagacgcagacgcgccgagacagaacttaatgggcccgctaacagcgcgatttgctggtgacccaatgcgaccagatgctccacgcccagtcgcgtaccgtcctcatgggagaaaataatactgttgatgggtgtctggtcagagacatcaagaaataacgccggaacattagtgcaggcagcttccacagcaatggcatcctggtcatccagcggatagttaatgatcagcccactgacgcgttgcgcgagaagattgtgcaccgccgctttacaggcttcgacgccgcttcgttctaccatcgacaccaccacgctggcacccagttgatcggcgcgagatttaatcgccgcgacaatttgcgacggcgcgtgcagggccagactggaggtggcaacgccaatcagcaacgactgtttgcccgccagttgttgtgccacgcggttgggaatgtaattcagctccgccatcgccgcttccactttttcccgcgttttcgcagaaacgtggctggcctggttcaccacgcgggaaacggtctgataagagacaccggcatactctgcgacatcgtataacgttactggtttcatattcaccaccctgaattgactctcttccgggcgctatcatgccataccgcgaaaggttttgcgccattcgatggcgcgccgctttt

SEQ ID NO: 53 - DNA, 3781 bp, Artificial Sequence
  vector
ggggaattgtgagcggataacaattcccctgtagaaataattttgtttaactttaataaggagatataccatgggcagcagccatcaccatcatcaccacagccaggatccgaattcgagctcggcgcgcctgcaggtcgacaagcttgcggccgcataatgcttaagtcgaacagaaagtaatcgtattgtacacggccgcataatcgaaattaatacgactcactataggggaattgtgagcggataacaattccccatcttagtatattagttaagtataagaaggagatatacatatggcagatctcaattggatatcggccggccacgcgatcgctgacgtcggtaccctcgagtctggtaaagaaaccgctgctgcgaaatttgaacgccagcacatggactcgtctactagcgcagcttaattaacctaggctgctgccaccgctgagcaataactagcataaccccttggggcctctaaacgggtcttgaggggttttttgctgaaacctcaggcatttgagaagcacacggtcacactgcttccggtagtcaataaaccggtaaaccagcaatagacataagcggctatttaacgaccctgccctgaaccgacgaccgggtcatcgtggccggatcttgcggcccctcggcttgaacgaattgttagacattatttgccgactaccttggtgatctcgcctttcacgtagtggacaaattcttccaactgatctgcgcgcgaggccaagcgatcttcttcttgtccaagataagcctgtctagcttcaagtatgacgggctgatactgggccggcaggcgctccattgcccagtcggcagcgacatccttcggcgcgattttgccggttactgcgctgtaccaaatgcgggacaacgtaagcactacatttcgctcatcgccagcccagtcgggcggcgagttccatagcgttaaggtttcatttagcgcctcaaatagatcctgttcaggaaccggatcaaagagttcctccgccgctggacctaccaaggcaacgctatgttctcttgcttttgtcagcaagatagccagatcaatgtcgatcgtggctggctcgaagatacctgcaagaatgtcattgcgctgccattctccaaattgcagttcgcgcttagctggataacgccacggaatgatgtcgtcgtgcacaacaatggtgacttctacagcgcggagaatctcgctctctccaggggaagccgaagtttccaaaaggtcgttgatcaaagctcgccgcgttgtttcatcaagccttacggtcaccgtaaccagcaaatcaatatcactgtgtggcttcaggccgccatccactgcggagccgtacaaatgtacggccagcaacgtcggttcgagatggcgctcgatgacgccaactacctctgatagttgagtcgatacttcggcgatcaccgcttccctcatactcttcctttttcaatattattgaagcatttatcagggttattgtctcatgagcggatacatatttgaatgtatttagaaaaataaacaaatagctagctcactcggtcgctacgctccgggcgtgagactgcggcgggcgctgcggacacatacaaagttacccacagattccgtggataagcaggggactaacatgtgaggcaaaacagcagggccgcgccggtggcgtttttccataggctccgccctcctgccagagttcacataaacagacgcttttccggtgcatctgtgggagccgtgaggctcaaccatgaatctgacagtacgggcgaaacccgacaggacttaaagatccccaccgtttccggcgggtcgctccctcttgcgctctcctgttccgaccctgccgtttaccggatacctgttccgcctttctcccttacgggaagtgtggcgctttctcatagctcacacactggtatctcggctcggtgtaggtcgttcgctccaagctgggctgtaagcaagaactccccgttcagcccgactgctgcgccttatccggtaactgttcacttgagtccaacccggaaaagcacggtaaaacgccactggcagcagccattggtaactgggagttcgcagaggatttgtttagctaaacacgcggttgctcttgaagtgtgcgccaaagtccggctacactggaaggacagatttggttgctgtgctctgcgaaagccagttaccacggttaagcagttccccaactgacttaaccttcgatcaaaccacctccccaggtggttttttcgtttacagggcaaaagattacgcgcagaaaaaaaggatctcaagaagatcctttgatcttttctactgaaccgctctagatttcagtgcaatttatctcttcaaatgtagcacctgaagtcagccccatacgatataagttgtaattctcatgttagtcatgccccgcgcccaccggaaggagctgactgggttgaaggctctcaagggcatcggtcgagatcccggtgcctaatgagtgagctaacttacattaattgcgttgcgctcactgcccgctttccagtcgggaaacctgtcgtgccagctgcattaatgaatcggccaacgcgcggggagaggcggtttgcgtattgggcgccagggtggtttttcttttcaccagtgagacgggcaacagctgattgcccttcaccgcctggccctgagagagttgcagcaagcggtccacgctggtttgccccagcaggcgaaaatcctgtttgatggtggttaacggcgggatataacatgagctgtcttcggtatcgtcgtatcccactaccgagatgtccgcaccaacgcgcagcccggactcggtaatggcgcgcattgcgcccagcgccatctgatcgttggcaaccagcatcgcagtgggaacgatgccctcattcagcatttgcatggtttgttgaaaaccggacatggcactccagtcgccttcccgttccgctatcggctgaatttgattgcgagtgagatatttatgccagccagccagacgcagacgcgccgagacagaacttaatgggcccgctaacagcgcgatttgctggtgacccaatgcgaccagatgctccacgcccagtcgcgtaccgtcttcatgggagaaaataatactgttgatgggtgtctggtcagagacatcaagaaataacgccggaacattagtgcaggcagcttccacagcaatggcatcctggtcatccagcggatagttaatgatcagcccactgacgcgttgcgcgagaagattgtgcaccgccgctttacaggcttcgacgccgcttcgttctaccatcgacaccaccacgctggcacccagttgatcggcgcgagatttaatcgccgcgacaatttgcgacggcgcgtgcagggccagactggaggtggcaacgccaatcagcaacgactgtttgcccgccagttgttgtgccacgcggttgggaatgtaattcagctccgccatcgccgcttccactttttcccgcgttttcgcagaaacgtggctggcctggttcaccacgcgggaaacggtctgataagagacaccggcatactctgcgacatcgtataacgttactggtttcacattcaccaccctgaattgactctcttccgggcgctatcatgccataccgcgaaaggttttgcgccattcgatggtgtccgggatctcgacgctctcccttatgcgactcctgcattaggaaattaatacgactcactata

SEQ ID NO: 54 - DNA, 4566 bp, Artificial Sequence
  vector
gcataatgcttaagtcgaacagaaagtaatcgtattgtacacggccgcataatcgaaattaatacgactcactataggggaattgtgagcggataacaattccccatcttagtatattagttaagtataagaaggagatatacatatggcagatctcaattggatatcggccggccacgcgatcgctgacgtcggtaccctcgagtctggtaaagaaaccgctgctgcgaaatttgaacgccagcacatggactcgtctactagcgcagcttaattaacctaggctgctgccaccgctgagcaataactagcataaccccttggggcctctaaacgggtcttgaggggttttttgctgaaacctcaggcatttgagaagcacacggtcacactgcttccggtagtcaataaaccggtaaaccagcaatagacataagcggctatttaacgaccctgccctgaaccgacgaccgggtcatcgtggccggatcttgcggcccctcggcttgaacgaattgttagacattatttgccgactaccttggtgatctcgcctttcacgtagtggacaaattcttccaactgatctgcgcgcgaggccaagcgatcttcttcttgtccaagataagcctgtctagcttcaagtatgacgggctgatactgggccggcaggcgctccattgcccagtcggcagcgacatccttcggcgcgattttgccggttactgcgctgtaccaaatgcgggacaacgtaagcactacatttcgctcatcgccagcccagtcgggcggcgagttccatagcgttaaggtttcatttagcgcctcaaatagatcctgttcaggaaccggatcaaagagttcctccgccgctggacctaccaaggcaacgctatgttctcttgcttttgtcagcaagatagccagatcaatgtcgatcgtggctggctcgaagatacctgcaagaatgtcattgcgctgccattctccaaattgcagttcgcgcttagctggataacgccacggaatgatgtcgtcgtgcacaacaatggtgacttctacagcgcggagaatctcgctctctccaggggaagccgaagtttccaaaaggtcgttgatcaaagctcgccgcgttgtttcatcaagccttacggtcaccgtaaccagcaaatcaatatcactgtgtggcttcaggccgccatccactgcggagccgtacaaatgtacggccagcaacgtcggttcgagatggcgctcgatgacgccaactacctctgatagttgagtcgatacttcggcgatcaccgcttccctcatactcttcctttttcaatattattgaagcatttatcagggttattgtctcatgagcggatacatatttgaatgtatttagaaaaataaacaaatagctagctcactcggtcgctacgctccgggcgtgagactgcggcgggcgctgcggacacatacaaagttacccacagattccgtggataagcaggggactaacatgtgaggcaaaacagcagggccgcgccggtggcgtttttccataggctccgccctcctgccagagttcacataaacagacgcttttccggtgcatctgtgggagccgtgaggctcaaccatgaatctgacagtacgggcgaaacccgacaggacttaaagatccccaccgtttccggcgggtcgctccctcttgcgctctcctgttccgaccctgccgtttaccggatacctgttccgcctttctcccttacgggaagtgtggcgctttctcatagctcacacactggtatctcggctcggtgtaggtcgttcgctccaagctgggctgtaagcaagaactccccgttcagcccgactgctgcgccttatccggtaactgttcacttgagtccaacccggaaaagcacggtaaaacgccactggcagcagccattggtaactgggagttcgcagaggatttgtttagctaaacacgcggttgctcttgaagtgtgcgccaaagtccggctacactggaaggacagatttggttgctgtgctctgcgaaagccagttaccacggttaagcagttccccaactgacttaaccttcgatcaaaccacctccccaggtggttttttcgtttacagggcaaaagattacgcgcagaaaaaaaggatctcaagaagatcctttgatcttttctactgaaccgctctagatttcagtgcaatttatctcttcaaatgtagcacctgaagtcagccccatacgatataagttgtaattctcatgttagtcatgccccgcgcccaccggaaggagctgactgggttgaaggctctcaagggcatcggtcgagatcccggtgcctaatgagtgagctaacttacattaattgcgttgcgctcactgcccgctttccagtcgggaaacctgtcgtgccagctgcattaatgaatcggccaacgcgcggggagaggcggtttgcgtattgggcgccagggtggtttttcttttcaccagtgagacgggcaacagctgattgcccttcaccgcctggccctgagagagttgcagcaagcggtccacgctggtttgccccagcaggcgaaaatcctgtttgatggtggttaacggcgggatataacatgagctgtcttcggtatcgtcgtatcccactaccgagatgtccgcaccaacgcgcagcccggactcggtaatggcgcgcattgcgcccagcgccatctgatcgttggcaaccagcatcgcagtgggaacgatgccctcattcagcatttgcatggtttgttgaaaaccggacatggcactccagtcgccttcccgttccgctatcggctgaatttgattgcgagtgagatatttatgccagccagccagacgcagacgcgccgagacagaacttaatgggcccgctaacagcgcgatttgctggtgacccaatgcgaccagatgctccacgcccagtcgcgtaccgtcttcatgggagaaaataatactgttgatgggtgtctggtcagagacatcaagaaataacgccggaacattagtgcaggcagcttccacagcaatggcatcctggtcatccagcggatagttaatgatcagcccactgacgcgttgcgcgagaagattgtgcaccgccgctttacaggcttcgacgccgcttcgttctaccatcgacaccaccacgctggcacccagttgatcggcgcgagatttaatcgccgcgacaatttgcgacggcgcgtgcagggccagactggaggtggcaacgccaatcagcaacgactgtttgcccgccagttgttgtgccacgcggttgggaatgtaattcagctccgccatcgccgcttccactttttcccgcgttttcgcagaaacgtggctggcctggttcaccacgcgggaaacggtctgataagagacaccggcatactctgcgacatcgtataacgttactggtttcacattcaccaccctgaattgactctcttccgggcgctatcatgccataccgcgaaaggttttgcgccattcgatggtgtccgggatctcgacgctctcccttatgcgactcctgcattaggaaattaatacgactcactataggggaattgtgagcggataacaattcccctgtagaaataattttgtttaactttaataaggagatataccatggggcagtgagcgcaacgcaattaatgtaagttagctcactcattaggcaccccaggcttgacactttatgcttccggctcgtataatgtgtggaattgtgagcggataacaataacaatttcacacaggatctaggaaccaaggagagtggcatatgaaacaatctaatgtaaaatccaaggggccttttgcctcgaagtttgtgttaatcacgatgatcggtggcttttcgtcgttcagcgtcgcaaatgcggaaccgctttactccaagggcgactggctttttggcctgaatgcggcgaaagtattcacgaacgaaacgttggattcaatcagcgcgggcggtgcgccaatacccggggctggtgtcaatatcaccgatgacaccacgctgagtttcgacgtttcctattttttgaattcatctgtagcgttgaacttctttggtggtttgcctgccagcgctaatcttgcagggagcggcagtttggcaggactgcctgttggagagacggaatatggccctgctgttttgtcgcttcaatatcacttttcgactaattcatccgttagcccttatgttggtgccggtatcgctcgaatcttgtttctggaagaacaaggggatgcactcgcggacttcgacttgaaagacgcctgggcgcccgctgtccaagttggaatgcgctatcaaatgagcgataattggtttgccaatgccgatatacgttacacgccattcgaaacagatatctctgggacactcggcggggcgccagtcagaggcaagatttcggtggacccaacaattctcaatatcggtattgcctaccggttttaataaggtacccgtcaaaagggcggcc

SEQ ID NO: 55 - DNA, 4620 bp, Artificial Sequence
  vector
ggggaattgtgagcggataacaattcccctgtagaaataattttgtttaactttaataaggagatataccatggggcagtgagcgcaacgcaattaatgtaagttagctcactcattaggcaccccaggcttgacactttatgcttccggctcgtataatgtgtggaattgtgagcggataacaataacaatttcacacaggatctaggaaccaaggagagtggcatttgtgttacgaaaaattgcagttttacctaaagccaatttgttttaataccaaaaaggataataaaaaaatgaaacctaaaataattagtaaagtctcgttagtggcgttccttttactttcacttgctgcgagcctggccaacgctcaatctgagccggtttacagtagaggcgactgggtggttggactgaatgccactagagttttaaccgatgaagatttgcgatcagcctctgcggggggtgcccccgttccaaattccaacctgtctattaacaacgatacgaccgtttcattcgacgtgtcgtattttctgagtaatcagctggcatttaacatttttggcggcattcccgctagtgcggacctccagggcgaagagtctctctccggtctttttcttggtcaaacagattatggtccggtaattctttcgcttcagtatcatgtcttaacgggtagcaacttctctccgtactttggagcgggtgtaggacggattctctttttagatgagaaggatcgcgcactaaccgacttcgacgtcgaagatacatgggcccctgcgattcaggctggttttcgctggaggatacacaataactggtcggcaaattttgacgttagatatgcacccttcaaagcggatatcaccggtaacctaggcccggcccctgttcaggcagaagtggaagtggaccccactatcgtgagcatcggtgtcgcatatcgcttttaataaggtacccgtcaaaagggcggccgcataatgcttaagtcgaacagaaagtaatcgtattgtacacggccgcataatcgaaattaatacgactcactataggggaattgtgagcggataacaattccccatcttagtatattagttaagtataagaaggagatatacatatggcagatctcaattggatatcggccggccacgcgatcgctgacgtcggtaccctcgagtctggtaaagaaaccgctgctgcgaaatttgaacgccagcacatggactcgtctactagcgcagcttaattaacctaggctgctgccaccgctgagcaataactagcataaccccttggggcctctaaacgggtcttgaggggttttttgctgaaacctcaggcatttgagaagcacacggtcacactgcttccggtagtcaataaaccggtaaaccagcaatagacataagcggctatttaacgaccctgccctgaaccgacgaccgggtcatcgtggccggatcttgcggcccctcggcttgaacgaattgttagacattatttgccgactaccttggtgatctcgcctttcacgtagtggacaaattcttccaactgatctgcgcgcgaggccaagcgatcttcttcttgtccaagataagcctgtctagcttcaagtatgacgggctgatactgggccggcaggcgctccattgcccagtcggcagcgacatccttcggcgcgattttgccggttactgcgctgtaccaaatgcgggacaacgtaagcactacatttcgctcatcgccagcccagtcgggcggcgagttccatagcgttaaggtttcatttagcgcctcaaatagatcctgttcaggaaccggatcaaagagttcctccgccgctggacctaccaaggcaacgctatgttctcttgcttttgtcagcaagatagccagatcaatgtcgatcgtggctggctcgaagatacctgcaagaatgtcattgcgctgccattctccaaattgcagttcgcgcttagctggataacgccacggaatgatgtcgtcgtgcacaacaatggtgacttctacagcgcggagaatctcgctctctccaggggaagccgaagtttccaaaaggtcgttgatcaaagctcgccgcgttgtttcatcaagccttacggtcaccgtaaccagcaaatcaatatcactgtgtggcttcaggccgccatccactgcggagccgtacaaatgtacggccagcaacgtcggttcgagatggcgctcgatgacgccaactacctctgatagttgagtcgatacttcggcgatcaccgcttccctcatactcttcctttttcaatattattgaagcatttatcagggttattgtctcatgagcggatacatatttgaatgtatttagaaaaataaacaaatagctagctcactcggtcgctacgctccgggcgtgagactgcggcgggcgctgcggacacatacaaagttacccacagattccgtggataagcaggggactaacatgtgaggcaaaacagcagggccgcgccggtggcgtttttccataggctccgccctcctgccagagttcacataaacagacgcttttccggtgcatctgtgggagccgtgaggctcaaccatgaatctgacagtacgggcgaaacccgacaggacttaaagatccccaccgtttccggcgggtcgctccctcttgcgctctcctgttccgaccctgccgtttaccggatacctgttccgcctttctcccttacgggaagtgtggcgctttctcatagctcacacactggtatctcggctcggtgtaggtcgttcgctccaagctgggctgtaagcaagaactccccgttcagcccgactgctgcgccttatccggtaactgttcacttgagtccaacccggaaaagcacggtaaaacgccactggcagcagccattggtaactgggagttcgcagaggatttgtttagctaaacacgcggttgctcttgaagtgtgcgccaaagtccggctacactggaaggacagatttggttgctgtgctctgcgaaagccagttaccacggttaagcagttccccaactgacttaaccttcgatcaaaccacctccccaggtggttttttcgtttacagggcaaaagattacgcgcagaaaaaaaggatctcaagaagatcctttgatcttttctactgaaccgctctagatttcagtgcaatttatctcttcaaatgtagcacctgaagtcagccccatacgatataagttgtaattctcatgttagtcatgccccgcgcccaccggaaggagctgactgggttgaaggctctcaagggcatcggtcgagatcccggtgcctaatgagtgagctaacttacattaattgcgttgcgctcactgcccgctttccagtcgggaaacctgtcgtgccagctgcattaatgaatcggccaacgcgcggggagaggcggtttgcgtattgggcgccagggtggtttttcttttcaccagtgagacgggcaacagctgattgcccttcaccgcctggccctgagagagttgcagcaagcggtccacgctggtttgccccagcaggcgaaaatcctgtttgatggtggttaacggcgggatataacatgagctgtcttcggtatcgtcgtatcccactaccgagatgtccgcaccaacgcgcagcccggactcggtaatggcgcgcattgcgcccagcgccatctgatcgttggcaaccagcatcgcagtgggaacgatgccctcattcagcatttgcatggtttgttgaaaaccggacatggcactccagtcgccttcccgttccgctatcggctgaatttgattgcgagtgagatatttatgccagccagccagacgcagacgcgccgagacagaacttaatgggcccgctaacagcgcgatttgctggtgacccaatgcgaccagatgctccacgcccagtcgcgtaccgtcttcatgggagaaaataatactgttgatgggtgtctggtcagagacatcaagaaataacgccggaacattagtgcaggcagcttccacagcaatggcatcctggtcatccagcggatagttaatgatcagcccactgacgcgttgcgcgagaagattgtgcaccgccgctttacaggcttcgacgccgcttcgttctaccatcgacaccaccacgctggcacccagttgatcggcgcgagatttaatcgccgcgacaatttgcgacggcgcgtgcagggccagactggaggtggcaacgccaatcagcaacgactgtttgcccgccagttgttgtgccacgcggttgggaatgtaattcagctccgccatcgccgcttccactttttcccgcgttttcgcagaaacgtggctggcctggttcaccacgcgggaaacggtctgataagagacaccggcatactctgcgacatcgtataacgttactggtttcacattcaccaccctgaattgactctcttccgggcgctatcatgccataccgcgaaaggttttgcgccattcgatggtgtccgggatctcgacgctctcccttatgcgactcctgcattaggaaattaatacgactcactata

SEQ ID NO: 56 - DNA, 4563 bp, Artificial Sequence
  vector
ggggaattgtgagcggataacaattcccctgtagaaataattttgtttaactttaataaggagatataccatggggcagtgagcgcaacgcaattaatgtaagttagctcactcattaggcaccccaggcttgacactttatgcttccggctcgtataatgtgtggaattgtgagcggataacaataacaatttcacacaggatctaggaaccaaggagagtggcatatgagaaaaaatggagcatatatgtatgcaaggcttgcgcaatacgccaccgcgctcgccgtcttgagcgtcttcccccaggctgcattggcccagaattcggaaggattcaagctgtgggccgtaagtctgaatgcaactagggtcttcgtggatgaggatgcgcccgacatcaccttggctggagggcctgttccgggctcgaatgtgaggatcggggatgccacgtcggcgaccattgatatcggatatttcttcacgcccaatgttgctggtaatttgtttctcggcgtgccggcgaccgcgcaaattgacggcgctgggtcacttgagccgctcggaactctagccaaggtcaactatggacccatcatcttgtcggcccagtaccatttcaacaatcttggcaaggttcatccctatctgggagtgggcgtcgggcggatcgtctttctgaatgagcgtgacagagctttgcttaatttcagtatcgacgacagttgggcgcctgcggctcaggtgggtgttcggtacgagcttggcgcagaatggatgctgaacgctgacgttcgatacgttcccttctccacgcacgctaccggttcactgggtggagcgcctgtccggacacgtttggacatcgacccgatcctgacgagcgccggagtgacttaccggttttagtaaggtacccgtcaaaagggcggccgcataatgcttaagtcgaacagaaagtaatcgtattgtacacggccgcataatcgaaattaatacgactcactataggggaattgtgagcggataacaattccccatcttagtatattagttaagtataagaaggagatatacatatggcagatctcaattggatatcggccggccacgcgatcgctgacgtcggtaccctcgagtctggtaaagaaaccgctgctgcgaaatttgaacgccagcacatggactcgtctactagcgcagcttaattaacctaggctgctgccaccgctgagcaataactagcataaccccttggggcctctaaacgggtcttgaggggttttttgctgaaacctcaggcatttgagaagcacacggtcacactgcttccggtagtcaataaaccggtaaaccagcaatagacataagcggctatttaacgaccctgccctgaaccgacgaccgggtcatcgtggccggatcttgcggcccctcggcttgaacgaattgttagacattatttgccgactaccttggtgatctcgcctttcacgtagtggacaaattcttccaactgatctgcgcgcgaggccaagcgatcttcttcttgtccaagataagcctgtctagcttcaagtatgacgggctgatactgggccggcaggcgctccattgcccagtcggcagcgacatccttcggcgcgattttgccggttactgcgctgtaccaaatgcgggacaacgtaagcactacatttcgctcatcgccagcccagtcgggcggcgagttccatagcgttaaggtttcatttagcgcctcaaatagatcctgttcaggaaccggatcaaagagttcctccgccgctggacctaccaaggcaacgctatgttctcttgcttttgtcagcaagatagccagatcaatgtcgatcgtggctggctcgaagatacctgcaagaatgtcattgcgctgccattctccaaattgcagttcgcgcttagctggataacgccacggaatgatgtcgtcgtgcacaacaatggtgacttctacagcgcggagaatctcgctctctccaggggaagccgaagtttccaaaaggtcgttgatcaaagctcgccgcgttgtttcatcaagccttacggtcaccgtaaccagcaaatcaatatcactgtgtggcttcaggccgccatccactgcggagccgtacaaatgtacggccagcaacgtcggttcgagatggcgctcgatgacgccaactacctctgatagttgagtcgatacttcggcgatcaccgcttccctcatactcttcctttttcaatattattgaagcatttatcagggttattgtctcatgagcggatacatatttgaatgtatttagaaaaataaacaaatagctagctcactcggtcgctacgctccgggcgtgagactgcggcgggcgctgcggacacatacaaagttacccacagattccgtggataagcaggggactaacatgtgaggcaaaacagcagggccgcgccggtggcgtttttccataggctccgccctcctgccagagttcacataaacagacgcttttccggtgcatctgtgggagccgtgaggctcaaccatgaatctgacagtacgggcgaaacccgacaggacttaaagatccccaccgtttccggcgggtcgctccctcttgcgctctcctgttccgaccctgccgtttaccggatacctgttccgcctttctcccttacgggaagtgtggcgctttctcatagctcacacactggtatctcggctcggtgtaggtcgttcgctccaagctgggctgtaagcaagaactccccgttcagcccgactgctgcgccttatccggtaactgttcacttgagtccaacccggaaaagcacggtaaaacgccactggcagcagccattggtaactgggagttcgcagaggatttgtttagctaaacacgcggttgctcttgaagtgtgcgccaaagtccggctacactggaaggacagatttggttgctgtgctctgcgaaagccagttaccacggttaagcagttccccaactgacttaaccttcgatcaaaccacctccccaggtggttttttcgtttacagggcaaaagattacgcgcagaaaaaaaggatctcaagaagatcctttgatcttttctactgaaccgctctagatttcagtgcaatttatctcttcaaatgtagcacctgaagtcagccccatacgatataagttgtaattctcatgttagtcatgccccgcgcccaccggaaggagctgactgggttgaaggctctcaagggcatcggtcgagatcccggtgcctaatgagtgagctaacttacattaattgcgttgcgctcactgcccgctttccagtcgggaaacctgtcgtgccagctgcattaatgaatcggccaacgcgcggggagaggcggtttgcgtattgggcgccagggtggtttttcttttcaccagtgagacgggcaacagctgattgcccttcaccgcctggccctgagagagttgcagcaagcggtccacgctggtttgccccagcaggcgaaaatcctgtttgatggtggttaacggcgggatataacatgagctgtcttcggtatcgtcgtatcccactaccgagatgtccgcaccaacgcgcagcccggactcggtaatggcgcgcattgcgcccagcgccatctgatcgttggcaaccagcatcgcagtgggaacgatgccctcattcagcatttgcatggtttgttgaaaaccggacatggcactccagtcgccttcccgttccgctatcggctgaatttgattgcgagtgagatatttatgccagccagccagacgcagacgcgccgagacagaacttaatgggcccgctaacagcgcgatttgctggtgacccaatgcgaccagatgctccacgcccagtcgcgtaccgtcttcatgggagaaaataatactgttgatgggtgtctggtcagagacatcaagaaataacgccggaacattagtgcaggcagcttccacagcaatggcatcctggtcatccagcggatagttaatgatcagcccactgacgcgttgcgcgagaagattgtgcaccgccgctttacaggcttcgacgccgcttcgttctaccatcgacaccaccacgctggcacccagttgatcggcgcgagatttaatcgccgcgacaatttgcgacggcgcgtgcagggccagactggaggtggcaacgccaatcagcaacgactgtttgcccgccagttgttgtgccacgcggttgggaatgtaattcagctccgccatcgccgcttccactttttcccgcgttttcgcagaaacgtggctggcctggttcaccacgcgggaaacggtctgataagagacaccggcatactctgcgacatcgtataacgttactggtttcacattcaccaccctgaattgactctcttccgggcgctatcatgccataccgcgaaaggttttgcgccattcgatggtgtccgggatctcgacgctctcccttatgcgactcctgcattaggaaattaatacgactcactata

SEQ ID NO: 57 - DNA, 1686 bp, Pseudomonas putida
ttgaagaaggtttggcttaaccgttatcccgcggacgttccgacggagatcaaccctgaccgttatcaatctctggtagatatgtttgagcagtcggtcgcgcgctacgccgatcaacctgcgtttgtgaatatgggggaggtaatgaccttccgcaagctggaagaacgcagtcgcgcgtttgccgcttatttgcaacaagggttggggctgaagaaaggcgatcgcgttgcgttgatgatgcctaatttattgcaatatccggtggcgctgtttggcattttgcgtgccgggatgatcgtcgtaaacgttaacccgttgtataccccgcgtgagcttgagcatcagcttaacgatagcggcgcatcggcgattgttatcgtgtctaactttgctcacacactggaaaaagtggttgataaaaccgccgttcagcacgtaattctgacccgtatgggcgatcagctatctacggcaaaaggcacggtagtcaatttcgttgttaaatacatcaagcgtttggtgccgaaataccatctgccagatgccatttcatttcgtagcgcactgcataacggctaccggatgcagtacgtcaaacccgaactggtgccggaagatttagcttttctgcaatacaccggcggcaccactggtgtggcgaaaggcgcgatgctgactcaccgcaatatgctggcgaacctggaacaggttaacgcgacctatggtccgctgttgcatccgggcaaagagctggtggtgacggcgctgccgctgtatcacatttttgccctgaccattaactgcctgctgtttatcgaactgggtgggcagaacctgcttatcactaacccgcgcgatattccagggttggtaaaagagttagcgaaatatccgtttaccgctatcacgggcgttaacaccttgttcaatgcgttgctgaacaataaagagttccagcagctggatttctccagtctgcatctttccgcaggcggtgggatgccagtgcagcaagtggtggcagagcgttgggtgaaactgaccggacagtatctgctggaaggctatggccttaccgagtgtgcgccgctggtcagcgttaacccatatgatattgattatcatagtggtagcatcggtttgccggtgccgtcgacggaagccaaactggtggatgatgatgataatgaagtaccaccaggtcaaccgggtgagctttgtgtcaaaggaccgcaggtgatgctgggttactggcagcgtcccgatgctaccgatgaaatcatcaaaaatggctggttacacaccggcgacatcgcggtaatggatgaagaaggattcctgcgcattgtcgatcgtaaaaaagacatgattctggtttccggttttaacgtctatcccaacgagattgaagatgtcgtcatgcagcatcctggcgtacaggaagtcgcggctgttggcgtaccttccggctccagtggtgaagcggtgaaaatcttcgtagtgaaaaaagatccatcgcttaccgaagagtcactggtgactttttgccgccgtcagctcacgggatacaaagtaccgaagctggtggagtttcgtgatgagttaccgaaatctaacgtcggaaaaattttgcgacgagaattacgtgacgaagcgcgcggcaaagtggacaataaagcctga

SEQ ID NO: 58 - DNA, 1004 bp, Artificial Sequence
  vector
ggcagtgagcgcaacgcaattaatgtaagttagctcactcattaggcaccccaggcttgacactttatgcttccggctcgtataatgtgtggaattgtgagcggataacaataacaatttcacacaggatctaggaaccaaggagagtggcatgtgagtttttctaattataaagtaatcgcgatgccggtgttggttgctaattttgttttgggggcggccactgcatgggcgaatgaaaattatccggcgaaatctgctggctataatcagggtgactgggtcgctagcttcaatttttctaaggtctatgtgggtgaggagcttggcgatctaaatgttggagggggggctttgccaaatgctgatgtaagtattggtaatgatacaacacttacgtttgatatcgcctattttgttagctcaaatatagcggtggatttttttgttggggtgccagctagggctaaatttcaaggtgagaaatcaatctcctcgctgggaagagtcagtgaagttgattacggccctgcaattctttcgcttcaatatcattacgatagctttgagcgactttatccatatgttggggttggtgttggtcgggtgctattttttgataaaaccgacggtgctttgagttcgtttgatattaaggataaatgggcgcctgcttttcaggttggccttagatatgaccttggtaactcatggatgctaaattcagatgtgcgttatattcctttcaaaacggacgtcacaggtactcttggcccggttcctgtttctactaaaattgaggttgatcctttcattctcagtcttggtgcgtcatatgttttctaaggtaccctcgagtctggtaaagaaaccgctgctgcgaaatttgaacgccagcacatggactcgtctactagcgcagcttaattaacctaggctgctgccaccgctgagcaataactagcataaccccttggggcctctaaacgggtcttgaggggttt

SEQ ID NO: 59 - DNA, 35 bp, Artificial Sequence
  primer
atccgctcacaattgcaaatgcctgaggtttcagc

SEQ ID NO: 60 - DNA, 35 bp, Artificial Sequence
  primer
cttcccttcattttggtctcggtcgatcattcagc

SEQ ID NO: 61 - DNA, 35 bp, Artificial Sequence
  primer
acttagtcgctgaaggtctcggtcgatcattcagc

SEQ ID NO: 62 - DNA, 6046 bp, Artificial Sequence
  vector
accaatgcttaatcagtgaggcacctatctcagcgatctgtctatttcgttcatccatagttgcctgactccccgtcgtgtagataactacgatacgggagggcttaccatctggccccagcgctgcgatgataccgcgagaaccacgctcaccggctccggatttatcagcaataaaccagccagccggaagggccgagcgcagaagtggtcctgcaactttatccgcctccatccagtctattaattgttgccgggaagctagagtaagtagttcgccagttaatagtttgcgcaacgttgttgccatcgctacaggcatcgtggtgtcacgctcgtcgtttggtatggcttcattcagctccggttcccaacgatcaaggcgagttacatgatcccccatgttgtgcaaaaaagcggttagctccttcggtcctccgatcgttgtcagaagtaagttggccgcagtgttatcactcatggttatggcagcactgcataattctcttactgtcatgccatccgtaagatgcttttctgtgactggtgagtactcaaccaagtcattctgagaatagtgtatgcggcgaccgagttgctcttgcccggcgtcaatacgggataataccgcgccacatagcagaactttaaaagtgctcatcattggaaaacgttcttcggggcgaaaactctcaaggatcttaccgctgttgagatccagttcgatgtaacccactcgtgcacccaactgatcttcagcatcttttactttcaccagcgtttctgggtgagcaaaaacaggaaggcaaaatgccgcaaaaaagggaataagggcgacacggaaatgttgaatactcatattcttcctttttcaatattattgaagcatttatcagggttattgtctcatgagcggatacatatttgaatgtatttagaaaaataaacaaataggggtcagtgttacaaccaattaaccaattctgaacattatcgcgagcccatttatacctgaatatggctcataacaccccttgtttgcctggcggcagtagcgcggtggtcccacctgaccccatgccgaactcagaagtgaaacgccgtagcgccgatggtagtgtggggactccccatgcgagagtagggaactgccaggcatcaaataaaacgaaaggctcagtcgaaagactgggcctttcgcccgggctaattatggggtgtcgcccttattcgactctatagtgaagttcctattctctagaaagtataggaacttctgaagtgggggcggccgcaaattcagtaagcagaaagtcaaaagcctccgaccggaggcttttgactattaggaaacgctgttgccattagacgtcttgccggtgctaatagcaccattcgcacctgcatttttcggacgccactcggttgcaccattgacgattgcagtaccatcctccagacgcagcaggtgttgatattggctacgcacaccaactttggacgggtccatcgccgtcacgctttccaaaacgctgtcacggccgcactcgcgacgatattccagagccaggctgcacagctcctgcgtttccaggacctcggtcggcatgctctccagaatccagccaatgtatttgacgttgctgacatgttgattcacatccagatcgttccagcctggggtcaagcctttttggatgctgtcaccggtcttaaccttgaacttatggaccttcagatcgctatcctcgataaccggagagtcaacgaacagagggacgatttcctgatgcacctcgtacggcagcttgctcaggcgacgagttttctgattcatcatggcatacgcgctggtcgcacgcaccaggatttcgcccgtattgcaatcgctaatcagccagtcgcgacccataccaatcttacccagacggctgaaacgcgtgttaatctcaacggtgtcaccccaggccgggtaacggttaactttgatctgcatcttaatcaccacccaaatcaaatcacgcttacacatctccagggtgcgaccgaaaccatccaacaggataccggtagatttacagtggttcaagctggtttcctgcaggtggttcatcagggtttcgatgctcgcggtacgatccgtgccaatctcgtagctgcggatgctaaaggattgacgaaacaccaggccgtcctggaccgtgctttccagaccaaacgagtctaccagcatgtccgggcgtttggatttgcggtcgtgcatatgttttacctcctgttaaacaaaattatttctagagggaaaccgttgtggaattgtgagcgctcacaattccacatccacacattatacgagccgatgattaattgtcaacagcgtcgatcactgtgcatgaagctcgtaattgttatccgctcacaattgcaaatgcctgaggtttcagcaaaaaacccctcaagacccgtttagaggccccaaggggttatgctagttattgctcagcggtggcagcagcctaggttaattaagctgcgctagtagacgagtccatgtgctggcgttcaaatttcgcagcagcggtttctttaccagactcgagggtaccttagaaaacatatgacgcaccaagactgagaatgaaaggatcaacctcaattttagtagaaacaggaaccgggccaagagtacctgtgacgtccgttttgaaaggaatataacgcacatctgaatttagcatccatgagttaccaaggtcatatctaaggccaacctgaaaagcaggcgcccatttatccttaatatcaaacgaactcaaagcaccgtcggttttatcaaaaaatagcacccgaccaacaccaaccccaacatatggataaagtcgctcaaagctatcgtaatgatattgaagcgaaagaattgcagggccgtaatcaacttcactgactcttcccagcgaggagattgatttctcaccttgaaatttagccctagctggcaccccaacaaaaaaatccaccgctatatttgagctaacaaaataggcgatatcaaacgtaagtgttgtatcattaccaatacttacatcagcatttggcaaagccccccctccaacatttagatcgccaagctcctcacccacatagaccttagaaaaattgaagctagcgacccagtcaccctgattatagccagcagatttcgccggataattttcattcgcccatgcagtggccgcccccaaaacaaaattagcaaccaacaccggcatcgcgattactttataattagaaaaactcacatgccactctccttggttcctagatcctgtgtgaaattgttattgttatccgctcacaattccacacattatacgagccggaagcataaagtgtcaagcctggggtgcctaatgagtgagctaacttacattaattgcgttgcgctcactgcccgcatatctatgagccgggctgaatgatcgaccgagaccaaaatgaagggaagttcctatactttctagagaataggaacttctatagggagtcgaataagggcgacacaaaaggtattctaaatgcataataaatactgataacatcttatagtttgtattatattttgtattatcgttgacatgtataattttgatatcaaaaactgattttccctttattattttcgagatttattttcttaattctctttaacaaactagaaatattgtatatacaaaaaatcataaataatagatgaatagtttaattataggtgttcatcaatcgaaaaagcaacgtatcttatttaaagtgcgttgcttttttctcatttataaggttaaataattctcatatatcaagcaaagtgacaggcgcccttaaatattctgacaaatgctctttccctaaactccccccataaaaaaacccgccgaagcgggtttttacgttatttgcggattaacgattactcgttatcagaaccgcccaggatgcctggcagttccctactctcgccgctgcgctcggtcgttcggctgcgggacctcagcgctagcggagtgtatactggcttactatgttggcactgatgagggtgtcagtgaagtgcttcatgtggcaggagaaaaaaggctgcaccggtgcgtcagcagaatatgtgatacaggatatattccgcttcctcgctcactgactcgctacgctcggtcgttcgactgcggcgagcggaaatggcttacgaacggggcggagatttcctggaagatgccaggaagatacttaacagggaagtgagagggccgcggcaaagccgtttttccataggctccgcccccctgacaagcatcacgaaatctgacgctcaaatcagtggtggcgaaacccgacaggactataaagataccaggcgtttccccctggcggctccctcgtgcgctctcctgttcctgcctttcggtttaccggtgtcattccgctgttatggccgcgtttgtctcattccacgcctgacactcagttccgggtaggcagttcgctccaagctggactgtatgcacgaaccccccgttcagtccgaccgctgcgccttatccggtaactatcgtcttgagtccaacccggaaagacatgcaaaagcaccactggcagcagccactggtaattgatttagaggagttagtcttgaagtcatgcgccggttaaggctaaactgaaaggacaagttttggtgactgcgctcctccaagccagttacctcggttcaaagagttggtagctcagagaaccttcgaaaaaccgccctgcaaggcggttttttcgttttcagagcaagagattacgcgcagaccaaaacgatctcaagaagatcatcttattaatcactgcccgctttccagtcgggaaacctgtcgtgccagctgcattaatgaatcggccaacgcgcggggagaggcggtttgcgtattgggcgccagggtggtttttcttttcaccagtgagactggcaacagctgattgcccttcaccgcctggccctgagagagttgcagcaagcggtccacgctggtttgccccagcaggcgaaaatcctgtttgatggtggttaacggcgggatataacatgagctatcttcggtatcgtcgtatcccactaccgagatatccgcaccaacgcgcagcccggactcggtaatggcgcgcattgcgcccagcgccatctgatcgttggcaaccagcatcgcagtgggaacgatgccctcattcagcatttgcatggtttgttgaaaaccggacatggcactccagtcgccttcccgttccgctatcggctgaatttgattgcgagtgagatatttatgccagccagccagacgcagacgcgccgagacagaacttaatgggcccgctaacagcgcgatttgctggtgacccaatgcgaccagatgctccacgcccagtcgcgtaccgtcctcatgggagaaaataatactgttgatgggtgtctggtcagagacatcaagaaataacgccggaacattagtgcaggcagcttccacagcaatggcatcctggtcatccagcggatagttaatgatcagcccactgacgcgttgcgcgagaagattgtgcaccgccgctttacaggcttcgacgccgcttcgttctaccatcgacaccaccacgctggcacccagttgatcggcgcgagatttaatcgccgcgacaatttgcgacggcgcgtgcagggccagactggaggtggcaacgccaatcagcaacgactgtttgcccgccagttgttgtgccacgcggttgggaatgtaattcagctccgccatcgccgcttccactttttcccgcgttttcgcagaaacgtggctggcctggttcaccacgcgggaaacggtctgataagagacaccggcatactctgcgacatcgtataacgttactggtttcatattcaccaccctgaattgactctcttccgggcgctatcatgccataccgcgaaaggttttgcgccattcgatggcgcgccgctttt

SEQ ID NO: 63 - DNA, 6022 bp, Artificial Sequence
  vector
accaatgcttaatcagtgaggcacctatctcagcgatctgtctatttcgttcatccatagttgcctgactccccgtcgtgtagataactacgatacgggagggcttaccatctggccccagcgctgcgatgataccgcgagaaccacgctcaccggctccggatttatcagcaataaaccagccagccggaagggccgagcgcagaagtggtcctgcaactttatccgcctccatccagtctattaattgttgccgggaagctagagtaagtagttcgccagttaatagtttgcgcaacgttgttgccatcgctacaggcatcgtggtgtcacgctcgtcgtttggtatggcttcattcagctccggttcccaacgatcaaggcgagttacatgatcccccatgttgtgcaaaaaagcggttagctccttcggtcctccgatcgttgtcagaagtaagttggccgcagtgttatcactcatggttatggcagcactgcataattctcttactgtcatgccatccgtaagatgcttttctgtgactggtgagtactcaaccaagtcattctgagaatagtgtatgcggcgaccgagttgctcttgcccggcgtcaatacgggataataccgcgccacatagcagaactttaaaagtgctcatcattggaaaacgttcttcggggcgaaaactctcaaggatcttaccgctgttgagatccagttcgatgtaacccactcgtgcacccaactgatcttcagcatcttttactttcaccagcgtttctgggtgagcaaaaacaggaaggcaaaatgccgcaaaaaagggaataagggcgacacggaaatgttgaatactcatattcttcctttttcaatattattgaagcatttatcagggttattgtctcatgagcggatacatatttgaatgtatttagaaaaataaacaaataggggtcagtgttacaaccaattaaccaattctgaacattatcgcgagcccatttatacctgaatatggctcataacaccccttgtttgcctggcggcagtagcgcggtggtcccacctgaccccatgccgaactcagaagtgaaacgccgtagcgccgatggtagtgtggggactccccatgcgagagtagggaactgccaggcatcaaataaaacgaaaggctcagtcgaaagactgggcctttcgcccgggctaattatggggtgtcgccctttacacgtacttagtcgctgaaggtctcggtcgatcattcagcccggctcatagatatgcgggcagtgagcgcaacgcaattaatgtaagttagctcactcattaggcaccccaggcttgacactttatgcttccggctcgtataatgtgtggaattgtgagcggataacaataacaatttcacacaggatctaggaaccaaggagagtggcatgtgagtttttctaattataaagtaatcgcgatgccggtgttggttgctaattttgttttgggggcggccactgcatgggcgaatgaaaattatccggcgaaatctgctggctataatcagggtgactgggtcgctagcttcaatttttctaaggtctatgtgggtgaggagcttggcgatctaaatgttggagggggggctttgccaaatgctgatgtaagtattggtaatgatacaacacttacgtttgatatcgcctattttgttagctcaaatatagcggtggatttttttgttggggtgccagctagggctaaatttcaaggtgagaaatcaatctcctcgctgggaagagtcagtgaagttgattacggccctgcaattctttcgcttcaatatcattacgatagctttgagcgactttatccatatgttggggttggtgttggtcgggtgctattttttgataaaaccgacggtgctttgagttcgtttgatattaaggataaatgggcgcctgcttttcaggttggccttagatatgaccttggtaactcatggatgctaaattcagatgtgcgttatattcctttcaaaacggacgtcacaggtactcttggcccggttcctgtttctactaaaattgaggttgatcctttcattctcagtcttggtgcgtcatatgttttctaaggtaccctcgagtctggtaaagaaaccgctgctgcgaaatttgaacgccagcacatggactcgtctactagcgcagcttaattaacctaggctgctgccaccgctgagcaataactagcataaccccttggggcctctaaacgggtcttgaggggttttttgctgaaacctcaggcatttgcaattgtgagcggataacaattacgagcttcatgcacagtgatcgacgctgttgacaattaatcatcggctcgtataatgtgtggatgtggaattgtgagcgctcacaattccacaacggtttccctctagaaataattttgtttaacaggaggtaaaacatttgccagactggagcatgttgttggccgctattcgtacgatcttttccgcagccgaaaaacagtggaccctgctggatagcaagaaacgcggtgcggatgcagttgcggacgcgtctggcgtgggcaagatggtgaaaaacggtctggtctaccgtcagaatttcagcatccgtagctatgagattggtgtggacaagcgtgcgagcgttgaggctctgatgaatcattttcaagaaacgagcttgaatcactgcaaatgcatcggtctgatgcatggcggttttggttgcaccccggaaatgacgcgtcgtaatctgatctgggtcgttgccaagatgctggttcacgtggagcgttatccgtggtggggtgacgtagtgcagattaacacctggattagcagcagcggtaagaacggcatgggtcgcgactggcacgtgcacgactgtcagacgggcctgccgattatgcgtggcacctctgtgtgggtcatgatggataaacacactcgccgtctgagcaagctgccggaagaggttcgcgcagaaatcaccccgttcttcagcgaacgcgacgcggtcctggatgataacggccgtaaactgccgaaatttgacgatgatagcgcggcacacgtccgccgtggtttgacccctcgttggcatgatttcgacgtcaatcagcatgtcaacaacgtgaaatacgtcggttggattctggagagcgttccggtttggatgctggacggttacgaggttgccactatgtctctggaatatcgtcgcgagtgtcgtatggatagcgtggttcagtccctgaccgcggttagctcggatcacgcggacggcagcccgatcgtttgtcaacacctgctgcgcctggaagatggtacggagatcgtgcgtggtcaaaccgagtggcgtccgaagcaacaagcacgcgacctgggcaatatgggtttgcatccgaccgagtccaagtaatagtcaaaagcctccggtcggaggcttttgactttctgcttactgaatttgcggccgccgtcaataagggcgacacaaaaggtattctaaatgcataataaatactgataacatcttatagtttgtattatattttgtattatcgttgacatgtataattttgatatcaaaaactgattttccctttattattttcgagatttattttcttaattctctttaacaaactagaaatattgtatatacaaaaaatcataaataatagatgaatagtttaattataggtgttcatcaatcgaaaaagcaacgtatcttatttaaagtgcgttgcttttttctcatttataaggttaaataattctcatatatcaagcaaagtgacaggcgcccttaaatattctgacaaatgctctttccctaaactccccccataaaaaaacccgccgaagcgggtttttacgttatttgcggattaacgattactcgttatcagaaccgcccaggatgcctggcagttccctactctcgccgctgcgctcggtcgttcggctgcgggacctcagcgctagcggagtgtatactggcttactatgttggcactgatgagggtgtcagtgaagtgcttcatgtggcaggagaaaaaaggctgcaccggtgcgtcagcagaatatgtgatacaggatatattccgcttcctcgctcactgactcgctacgctcggtcgttcgactgcggcgagcggaaatggcttacgaacggggcggagatttcctggaagatgccaggaagatacttaacagggaagtgagagggccgcggcaaagccgtttttccataggctccgcccccctgacaagcatcacgaaatctgacgctcaaatcagtggtggcgaaacccgacaggactataaagataccaggcgtttccccctggcggctccctcgtgcgctctcctgttcctgcctttcggtttaccggtgtcattccgctgttatggccgcgtttgtctcattccacgcctgacactcagttccgggtaggcagttcgctccaagctggactgtatgcacgaaccccccgttcagtccgaccgctgcgccttatccggtaactatcgtcttgagtccaacccggaaagacatgcaaaagcaccactggcagcagccactggtaattgatttagaggagttagtcttgaagtcatgcgccggttaaggctaaactgaaaggacaagttttggtgactgcgctcctccaagccagttacctcggttcaaagagttggtagctcagagaaccttcgaaaaaccgccctgcaaggcggttttttcgttttcagagcaagagattacgcgcagaccaaaacgatctcaagaagatcatcttattaatcactgcccgctttccagtcgggaaacctgtcgtgccagctgcattaatgaatcggccaacgcgcggggagaggcggtttgcgtattgggcgccagggtggtttttcttttcaccagtgagactggcaacagctgattgcccttcaccgcctggccctgagagagttgcagcaagcggtccacgctggtttgccccagcaggcgaaaatcctgtttgatggtggttaacggcgggatataacatgagctatcttcggtatcgtcgtatcccactaccgagatatccgcaccaacgcgcagcccggactcggtaatggcgcgcattgcgcccagcgccatctgatcgttggcaaccagcatcgcagtgggaacgatgccctcattcagcatttgcatggtttgttgaaaaccggacatggcactccagtcgccttcccgttccgctatcggctgaatttgattgcgagtgagatatttatgccagccagccagacgcagacgcgccgagacagaacttaatgggcccgctaacagcgcgatttgctggtgacccaatgcgaccagatgctccacgcccagtcgcgtaccgtcctcatgggagaaaataatactgttgatgggtgtctggtcagagacatcaagaaataacgccggaacattagtgcaggcagcttccacagcaatggcatcctggtcatccagcggatagttaatgatcagcccactgacgcgttgcgcgagaagattgtgcaccgccgctttacaggcttcgacgccgcttcgttctaccatcgacaccaccacgctggcacccagttgatcggcgcgagatttaatcgccgcgacaatttgcgacggcgcgtgcagggccagactggaggtggcaacgccaatcagcaacgactgtttgcccgccagttgttgtgccacgcggttgggaatgtaattcagctccgccatcgccgcttccactttttcccgcgttttcgcagaaacgtggctggcctggttcaccacgcgggaaacggtctgataagagacaccggcatactctgcgacatcgtataacgttactggtttcatattcaccaccctgaattgactctcttccgggcgctatcatgccataccgcgaaaggttttgcgccattcgatggcgcgccgctttt

SEQ ID NO: 64 - DNA, 6038 bp, Artificial Sequence
  vector
accaatgcttaatcagtgaggcacctatctcagcgatctgtctatttcgttcatccatagttgcctgactccccgtcgtgtagataactacgatacgggagggcttaccatctggccccagcgctgcgatgataccgcgagaaccacgctcaccggctccggatttatcagcaataaaccagccagccggaagggccgagcgcagaagtggtcctgcaactttatccgcctccatccagtctattaattgttgccgggaagctagagtaagtagttcgccagttaatagtttgcgcaacgttgttgccatcgctacaggcatcgtggtgtcacgctcgtcgtttggtatggcttcattcagctccggttcccaacgatcaaggcgagttacatgatcccccatgttgtgcaaaaaagcggttagctccttcggtcctccgatcgttgtcagaagtaagttggccgcagtgttatcactcatggttatggcagcactgcataattctcttactgtcatgccatccgtaagatgcttttctgtgactggtgagtactcaaccaagtcattctgagaatagtgtatgcggcgaccgagttgctcttgcccggcgtcaatacgggataataccgcgccacatagcagaactttaaaagtgctcatcattggaaaacgttcttcggggcgaaaactctcaaggatcttaccgctgttgagatccagttcgatgtaacccactcgtgcacccaactgatcttcagcatcttttactttcaccagcgtttctgggtgagcaaaaacaggaaggcaaaatgccgcaaaaaagggaataagggcgacacggaaatgttgaatactcatattcttcctttttcaatattattgaagcatttatcagggttattgtctcatgagcggatacatatttgaatgtatttagaaaaataaacaaataggggtcagtgttacaaccaattaaccaattctgaacattatcgcgagcccatttatacctgaatatggctcataacaccccttgtttgcctggcggcagtagcgcggtggtcccacctgaccccatgccgaactcagaagtgaaacgccgtagcgccgatggtagtgtggggactccccatgcgagagtagggaactgccaggcatcaaataaaacgaaaggctcagtcgaaagactgggcctttcgcccgggctaattatggggtgtcgcccttattcgactctatagtgaagttcctattctctagaaagtataggaacttctgaagtgggggcggccgcaaattcagtaagcagaaagtcaaaagcctccgaccggaggcttttgactaaagcttaaacacgaggttccgccggaattacggagatgccgcggaaagaatccgtcagctttggacgccactccgtacgcgcacgcaggacttcggagccgccttccagttgcagcagatggtcgcagaccagacctgcctcgctagaaccgccgcttacggtggtcaggctgcgcagaacggagtcgcgagtacattcgcgacggtactccagagtaaaagaggaaatgtgatggctttcgaaaatgctgtccggcacagtctcgaagacccaagcaacgtatttcaggttgttcacatgctgattaacatccaggtcgttccagcgcggagtcagaccgccctggatgtagtccgcggtggagtcgttcagtttttgcagtttcttgatttcgtcgtctttaactgccacgttatcgatgaaagcaggaccgatctcaccgcgcacttcgtccgggatggtagacaggcgacgagtgcgggtgttcatcagaacgctcagggaggtgcaacgcgtcaggatttcgcccgttttacagtcacggaccagaaaatcgcgacgcataccattgttaccggacgcgccaatccaacactcgacttccacagtgtcaccccaagtagggtagcgctctactgctacgtgggtgcgacgcactacccacatcaggtcacgtttagacatttccagagtagtgccgaaaccatcacccaggataccaacagatttcgcgtgattcagggtggcttcctgcatgtggttcatgacggccaggatggaggtagaacgatctggacccacttcataagaacgaattgcgaaagtacgacgaaacaccagaccgtgcagaccgaagtgatcatccagcagttgaggcagttttggtttcggtttccactctagagtcattttataatcctccttgtaaacaaaattatttctagagggaaaccgttgtggaattgtgagcgctcacaattccacatccacacattatacgagccgatgattaattgtcaacagcgtcgatcactgtgcatgaagctcgtaattgttatccgctcacaattgcaaatgcctgaggtttcagcaaaaaacccctcaagacccgtttagaggccccaaggggttatgctagttattgctcagcggtggcagcagcctaggttaattaagctgcgctagtagacgagtccatgtgctggcgttcaaatttcgcagcagcggtttctttaccagactcgagggtaccttagaaaacatatgacgcaccaagactgagaatgaaaggatcaacctcaattttagtagaaacaggaaccgggccaagagtacctgtgacgtccgttttgaaaggaatataacgcacatctgaatttagcatccatgagttaccaaggtcatatctaaggccaacctgaaaagcaggcgcccatttatccttaatatcaaacgaactcaaagcaccgtcggttttatcaaaaaatagcacccgaccaacaccaaccccaacatatggataaagtcgctcaaagctatcgtaatgatattgaagcgaaagaattgcagggccgtaatcaacttcactgactcttcccagcgaggagattgatttctcaccttgaaatttagccctagctggcaccccaacaaaaaaatccaccgctatatttgagctaacaaaataggcgatatcaaacgtaagtgttgtatcattaccaatacttacatcagcatttggcaaagccccccctccaacatttagatcgccaagctcctcacccacatagaccttagaaaaattgaagctagcgacccagtcaccctgattatagccagcagatttcgccggataattttcattcgcccatgcagtggccgcccccaaaacaaaattagcaaccaacaccggcatcgcgattactttataattagaaaaactcacatgccactctccttggttcctagatcctgtgtgaaattgttattgttatccgctcacaattccacacattatacgagccggaagcataaagtgtcaagcctggggtgcctaatgagtgagctaacttacattaattgcgttgcgctcactgcccgcatatctatgagccgggctgaatgatcgaccgagaccaaaatgaagggaagttcctatactttctagagaataggaacttctatagggagtcgaataagggcgacacaaaaggtattctaaatgcataataaatactgataacatcttatagtttgtattatattttgtattatcgttgacatgtataattttgatatcaaaaactgattttccctttattattttcgagatttattttcttaattctctttaacaaactagaaatattgtatatacaaaaaatcataaataatagatgaatagtttaattataggtgttcatcaatcgaaaaagcaacgtatcttatttaaagtgcgttgcttttttctcatttataaggttaaataattctcatatatcaagcaaagtgacaggcgcccttaaatattctgacaaatgctctttccctaaactccccccataaaaaaacccgccgaagcgggtttttacgttatttgcggattaacgattactcgttatcagaaccgcccaggatgcctggcagttccctactctcgccgctgcgctcggtcgttcggctgcgggacctcagcgctagcggagtgtatactggcttactatgttggcactgatgagggtgtcagtgaagtgcttcatgtggcaggagaaaaaaggctgcaccggtgcgtcagcagaatatgtgatacaggatatattccgcttcctcgctcactgactcgctacgctcggtcgttcgactgcggcgagcggaaatggcttacgaacggggcggagatttcctggaagatgccaggaagatacttaacagggaagtgagagggccgcggcaaagccgtttttccataggctccgcccccctgacaagcatcacgaaatctgacgctcaaatcagtggtggcgaaacccgacaggactataaagataccaggcgtttccccctggcggctccctcgtgcgctctcctgttcctgcctttcggtttaccggtgtcattccgctgttatggccgcgtttgtctcattccacgcctgacactcagttccgggtaggcagttcgctccaagctggactgtatgcacgaaccccccgttcagtccgaccgctgcgccttatccggtaactatcgtcttgagtccaacccggaaagacatgcaaaagcaccactggcagcagccactggtaattgatttagaggagttagtcttgaagtcatgcgccggttaaggctaaactgaaaggacaagttttggtgactgcgctcctccaagccagttacctcggttcaaagagttggtagctcagagaaccttcgaaaaaccgccctgcaaggcggttttttcgttttcagagcaagagattacgcgcagaccaaaacgatctcaagaagatcatcttattaatcactgcccgctttccagtcgggaaacctgtcgtgccagctgcattaatgaatcggccaacgcgcggggagaggcggtttgcgtattgggcgccagggtggtttttcttttcaccagtgagactggcaacagctgattgcccttcaccgcctggccctgagagagttgcagcaagcggtccacgctggtttgccccagcaggcgaaaatcctgtttgatggtggttaacggcgggatataacatgagctatcttcggtatcgtcgtatcccactaccgagatatccgcaccaacgcgcagcccggactcggtaatggcgcgcattgcgcccagcgccatctgatcgttggcaaccagcatcgcagtgggaacgatgccctcattcagcatttgcatggtttgttgaaaaccggacatggcactccagtcgccttcccgttccgctatcggctgaatttgattgcgagtgagatatttatgccagccagccagacgcagacgcgccgagacagaacttaatgggcccgctaacagcgcgatttgctggtgacccaatgcgaccagatgctccacgcccagtcgcgtaccgtcctcatgggagaaaataatactgttgatgggtgtctggtcagagacatcaagaaataacgccggaacattagtgcaggcagcttccacagcaatggcatcctggtcatccagcggatagttaatgatcagcccactgacgcgttgcgcgagaagattgtgcaccgccgctttacaggcttcgacgccgcttcgttctaccatcgacaccaccacgctggcacccagttgatcggcgcgagatttaatcgccgcgacaatttgcgacggcgcgtgcagggccagactggaggtggcaacgccaatcagcaacgactgtttgcccgccagttgttgtgccacgcggttgggaatgtaattcagctccgccatcgccgcttccactttttcccgcgttttcgcagaaacgtggctggcctggttcaccacgcgggaaacggtctgataagagacaccggcatactctgcgacatcgtataacgttactggtttcatattcaccaccctgaattgactctcttccgggcgctatcatgccataccgcgaaaggttttgcgccattcgatggcgcgccgctttt

SEQ ID NO: 65 - DNA, 1377 bp, Acinetobacter sp. ADP1
  CDS (1)..(1377)
atgcgtcctctgcacccgatcgacttcatttttctgtcgctggagaagcgccagcagcctatgcatgtcggtggcctgttcttgtttcaaattccggataatgcgccggacacctttatccaagacctggtgaatgatatccgcattagcaaatctattccggtcccgccattcaacaacaaactgaacggcctgttttgggacgaggacgaggaatttgatctggatcaccattttcgtcacatcgcattgccgcacccaggtcgtattcgtgaactgctgatctacattagccaagagcacagcaccttgctggatcgcgccaagccgctgtggacgtgcaacattattgagggcattgaaggtaatcgttttgcgatgtatttcaagattcaccacgcgatggttgatggtgttgctggtatgcgtctgatcgaaaagagcctgtctcacgatgtgaccgagaaaagcatcgtgccgccgtggtgtgtggagggtaagcgtgctaaacgcctgcgtgaaccgaaaacgggtaagatcaaaaagattatgtccggtatcaaatctcagctgcaagcaactccgaccgtgatccaggaactgtcccagaccgtctttaaggacatcggtcgcaaccctgatcacgtcagcagcttccaggcaccgtgctccattctgaatcagcgtgtcagcagcagccgtcgctttgcggcgcaaagcttcgacctggatcgcttccgtaacatcgccaaaagcctgaatgtcaccattaacgacgttgttctggcggtgtgttccggcgctctgcgtgcgtacctgatgagccataatagcctgccgagcaaaccgttgattgcgatggtgccggcaagcattcgtaatgacgacagcgacgttagcaaccgtattacgatgatcctggcgaatctggcaacccataaagatgatccattgcagcgtctggaaatcattcgtcgcagcgtccaaaacagcaagcagcgtttcaagcgcatgacgagcgaccagatcctgaactattcggccgtggtttacggtccggcaggcctgaacatcatcagcggtatgatgccgaaacgtcaagcgttcaatctggttatttctaacgtcccgggtccgcgcgagccgttgtattggaatggcgcgaaactggatgctctgtacccggccagcattgttctggatggtcaggccctgaatatcaccatgacgtcctacttggacaagttggaggttggcctgatcgcgtgccgcaatgccctgccgcgtatgcagaacttgctgacccatctggaggaagagatccaactgttcgaaggcgtgattgcaaagcaagaggacatcaaaacggcgaactaa

SEQ ID NO: 66 - protein, 458 aa, Acinetobacter sp. ADP1
MRPLHPIDFIFLSLEKRQQPMHVGGLFLFQIPDNAPDTFIQDLVNDIRISKSIPVPPFNNKLNGLFWDEDEEFDLDHHFRHIALPHPGRIRELLIYISQEHSTLLDRAKPLWTCNIIEGIEGNRFAMYFKIHHAMVDGVAGMRLIEKSLSHDVTEKSIVPPWCVEGKRAKRLREPKTGKIKKIMSGIKSQLQATPTVIQELSQTVFKDIGRNPDHVSSFQAPCSILNQRVSSSRRFAAQSFDLDRFRNIAKSLNVTINDVVLAVCSGALRAYLMSHNSLPSKPLIAMVPASIRNDDSDVSNRITMILANLATHKDDPLQRLEIIRRSVQNSKQRFKRMTSDQILNYSAVVYGPAGLNIISGMMPKRQAFNLVISNVPGPREPLYWNGAKLDALYPASIVLDGQALNITMTSYLDKLEVGLIACRNALPRMQNLLTHLEEEIQLFEGVIAKQEDIKTAN

SEQ ID NO: 67 - DNA, 1374 bp, Alkanivorax borkumensis SK2
  CDS (1)..(1374)
atgaaagcgctgtccccggtggatcagctgttcctgtggctggagaaacgtcagcaaccgatgcatgttggtggtctgcagctgtttagcttcccagagggtgcgggtcctaagtacgttagcgagttggctcagcaaatgcgtgactactgtcacccggtggccccgttcaatcagcgcctgacccgtcgcctgggtcaatactattggacgcgcgacaaacaatttgacattgaccaccattttcgccatgaagcgctgccgaagccgggtcgcattcgcgaactgctgtccttggttagcgcggagcacagcaatctgttggaccgcgagcgccctatgtgggaagcgcacctgattgagggcatccgtggccgccaattcgctttgtactataagatccaccatagcgtgatggatggcatcagcgctatgcgcattgcgtctaaaacgctgagcaccgacccgtctgagcgcgaaatggcaccagcatgggccttcaataccaagaaacgtagccgtagcctgccttccaatccagttgatatggcgagcagcatggcccgtctgacggcttctatcagcaaacaggcggcgaccgttccgggtctggctcgtgaagtgtacaaggtcacccagaaagctaagaaggatgagaactacgtgagcatttttcaagcgccggataccatcttgaacaacaccattaccggttcccgtcgttttgcagcacagagctttccgctgccgcgtctgaaagttatcgcgaaggcgtataactgcaccatcaacaccgtcgtcctgtctatgtgtggccacgcgctgcgtgaatatctgattagccaacacgcactgccggatgagccgctgatcgcgatggtgccgatgagcctgcgtcaggacgacagcacgggtggtaatcagattggcatgatcctggccaacctgggcacccatatctgcgatccggcgaatcgtttgcgtgttattcacgactccgtcgaggaagcgaaatcgcgtttcagccagatgagcccggaggagatcctgaactttaccgcactgactatggccccgacgggcttgaatctgctgaccggcctggcaccgaaatggcgtgcgttcaacgtcgtcattagcaacattccgggtccgaaggaaccgctgtattggaatggcgcccagctgcaaggtgtgtacccggtaagcattgcgttggaccgtattgcactgaacatcacgctgactagctacgtggatcagatggagttcggtctgatcgcatgccgtcgcacgctgccgagcatgcaacgtctgctggattatctggaacaaagcattcgtgagttggaaatcggtgccggcatcaagtaa

SEQ ID NO: 68 - protein, 457 aa, Alkanivorax borkumensis SK2
MKALSPVDQLFLWLEKRQQPMHVGGLQLFSFPEGAGPKYVSELAQQMRDYCHPVAPFNQRLTRRLGQYYWTRDKQFDIDHHFRHEALPKPGRIRELLSLVSAEHSNLLDRERPMWEAHLIEGIRGRQFALYYKIHHSVMDGISAMRIASKTLSTDPSEREMAPAWAFNTKKRSRSLPSNPVDMASSMARLTASISKQAATVPGLAREVYKVTQKAKKDENYVSIFQAPDTILNNTITGSRRFAAQSFPLPRLKVIAKAYNCTINTVVLSMCGHALREYLISQHALPDEPLIAMVPMSLRQDDSTGGNQIGMILANLGTHICDPANRLRVIHDSVEEAKSRFSQMSPEEILNFTALTMAPTGLNLLTGLAPKWRAFNVVISNIPGPKEPLYWNGAQLQGVYPVSIALDRIALNITLTSYVDQMEFGLIACRRTLPSMQRLLDYLEQSIRELEIGAGIK

SEQ ID NO: 69 - DNA, 3087 bp, Artificial Sequence
  vector
atgcgtcctctgcacccgatcgacttcatttttctgtcgctggagaagcgccagcagcctatgcatgtcggtggcctgttcttgtttcaaattccggataatgcgccggacacctttatccaagacctggtgaatgatatccgcattagcaaatctattccggtcccgccattcaacaacaaactgaacggcctgttttgggacgaggacgaggaatttgatctggatcaccattttcgtcacatcgcattgccgcacccaggtcgtattcgtgaactgctgatctacattagccaagagcacagcaccttgctggatcgcgccaagccgctgtggacgtgcaacattattgagggcattgaaggtaatcgttttgcgatgtatttcaagattcaccacgcgatggttgatggtgttgctggtatgcgtctgatcgaaaagagcctgtctcacgatgtgaccgagaaaagcatcgtgccgccgtggtgtgtggagggtaagcgtgctaaacgcctgcgtgaaccgaaaacgggtaagatcaaaaagattatgtccggtatcaaatctcagctgcaagcaactccgaccgtgatccaggaactgtcccagaccgtctttaaggacatcggtcgcaaccctgatcacgtcagcagcttccaggcaccgtgctccattctgaatcagcgtgtcagcagcagccgtcgctttgcggcgcaaagcttcgacctggatcgcttccgtaacatcgccaaaagcctgaatgtcaccattaacgacgttgttctggcggtgtgttccggcgctctgcgtgcgtacctgatgagccataatagcctgccgagcaaaccgttgattgcgatggtgccggcaagcattcgtaatgacgacagcgacgttagcaaccgtattacgatgatcctggcgaatctggcaacccataaagatgatccattgcagcgtctggaaatcattcgtcgcagcgtccaaaacagcaagcagcgtttcaagcgcatgacgagcgaccagatcctgaactattcggccgtggtttacggtccggcaggcctgaacatcatcagcggtatgatgccgaaacgtcaagcgttcaatctggttatttctaacgtcccgggtccgcgcgagccgttgtattggaatggcgcgaaactggatgctctgtacccggccagcattgttctggatggtcaggccctgaatatcaccatgacgtcctacttggacaagttggaggttggcctgatcgcgtgccgcaatgccctgccgcgtatgcagaacttgctgacccatctggaggaagagatccaactgttcgaaggcgtgattgcaaagcaagaggacatcaaaacggcgaactaagcgttaagtctgagaggtgaagaattgaagaaggtttggcttaaccgttatcccgcggacgttccgacggagatcaaccctgaccgttatcaatctctggtagatatgtttgagcagtcggtcgcgcgctacgccgatcaacctgcgtttgtgaatatgggggaggtaatgaccttccgcaagctggaagaacgcagtcgcgcgtttgccgcttatttgcaacaagggttggggctgaagaaaggcgatcgcgttgcgttgatgatgcctaatttattgcaatatccggtggcgctgtttggcattttgcgtgccgggatgatcgtcgtaaacgttaacccgttgtataccccgcgtgagcttgagcatcagcttaacgatagcggcgcatcggcgattgttatcgtgtctaactttgctcacacactggaaaaagtggttgataaaaccgccgttcagcacgtaattctgacccgtatgggcgatcagctatctacggcaaaaggcacggtagtcaatttcgttgttaaatacatcaagcgtttggtgccgaaataccatctgccagatgccatttcatttcgtagcgcactgcataacggctaccggatgcagtacgtcaaacccgaactggtgccggaagatttagcttttctgcaatacaccggcggcaccactggtgtggcgaaaggcgcgatgctgactcaccgcaatatgctggcgaacctggaacaggttaacgcgacctatggtccgctgttgcatccgggcaaagagctggtggtgacggcgctgccgctgtatcacatttttgccctgaccattaactgcctgctgtttatcgaactgggtgggcagaacctgcttatcactaacccgcgcgatattccagggttggtaaaagagttagcgaaatatccgtttaccgctatcacgggcgttaacaccttgttcaatgcgttgctgaacaataaagagttccagcagctggatttctccagtctgcatctttccgcaggcggtgggatgccagtgcagcaagtggtggcagagcgttgggtgaaactgaccggacagtatctgctggaaggctatggccttaccgagtgtgcgccgctggtcagcgttaacccatatgatattgattatcatagtggtagcatcggtttgccggtgccgtcgacggaagccaaactggtggatgatgatgataatgaagtaccaccaggtcaaccgggtgagctttgtgtcaaaggaccgcaggtgatgctgggttactggcagcgtcccgatgctaccgatgaaatcatcaaaaatggctggttacacaccggcgacatcgcggtaatggatgaagaaggattcctgcgcattgtcgatcgtaaaaaagacatgattctggtttccggttttaacgtctatcccaacgagattgaagatgtcgtcatgcagcatcctggcgtacaggaagtcgcggctgttggcgtaccttccggctccagtggtgaagcggtgaaaatcttcgtagtgaaaaaagatccatcgcttaccgaagagtcactggtgactttttgccgccgtcagctcacgggatacaaagtaccgaagctggtggagtttcgtgatgagttaccgaaatctaacgtcggaaaaattttgcgacgagaattacgtgacgaagcgcgcggcaaagtggacaataaagcctga

SEQ ID NO: 70 - DNA, 3084 bp, Artificial Sequence
  vector
atgaaagcgctgtccccggtggatcagctgttcctgtggctggagaaacgtcagcaaccgatgcatgttggtggtctgcagctgtttagcttcccagagggtgcgggtcctaagtacgttagcgagttggctcagcaaatgcgtgactactgtcacccggtggccccgttcaatcagcgcctgacccgtcgcctgggtcaatactattggacgcgcgacaaacaatttgacattgaccaccattttcgccatgaagcgctgccgaagccgggtcgcattcgcgaactgctgtccttggttagcgcggagcacagcaatctgttggaccgcgagcgccctatgtgggaagcgcacctgattgagggcatccgtggccgccaattcgctttgtactataagatccaccatagcgtgatggatggcatcagcgctatgcgcattgcgtctaaaacgctgagcaccgacccgtctgagcgcgaaatggcaccagcatgggccttcaataccaagaaacgtagccgtagcctgccttccaatccagttgatatggcgagcagcatggcccgtctgacggcttctatcagcaaacaggcggcgaccgttccgggtctggctcgtgaagtgtacaaggtcacccagaaagctaagaaggatgagaactacgtgagcatttttcaagcgccggataccatcttgaacaacaccattaccggttcccgtcgttttgcagcacagagctttccgctgccgcgtctgaaagttatcgcgaaggcgtataactgcaccatcaacaccgtcgtcctgtctatgtgtggccacgcgctgcgtgaatatctgattagccaacacgcactgccggatgagccgctgatcgcgatggtgccgatgagcctgcgtcaggacgacagcacgggtggtaatcagattggcatgatcctggccaacctgggcacccatatctgcgatccggcgaatcgtttgcgtgttattcacgactccgtcgaggaagcgaaatcgcgtttcagccagatgagcccggaggagatcctgaactttaccgcactgactatggccccgacgggcttgaatctgctgaccggcctggcaccgaaatggcgtgcgttcaacgtcgtcattagcaacattccgggtccgaaggaaccgctgtattggaatggcgcccagctgcaaggtgtgtacccggtaagcattgcgttggaccgtattgcactgaacatcacgctgactagctacgtggatcagatggagttcggtctgatcgcatgccgtcgcacgctgccgagcatgcaacgtctgctggattatctggaacaaagcattcgtgagttggaaatcggtgccggcatcaagtaagcgttaagtctgagaggtgaagaattgaagaaggtttggcttaaccgttatcccgcggacgttccgacggagatcaaccctgaccgttatcaatctctggtagatatgtttgagcagtcggtcgcgcgctacgccgatcaacctgcgtttgtgaatatgggggaggtaatgaccttccgcaagctggaagaacgcagtcgcgcgtttgccgcttatttgcaacaagggttggggctgaagaaaggcgatcgcgttgcgttgatgatgcctaatttattgcaatatccggtggcgctgtttggcattttgcgtgccgggatgatcgtcgtaaacgttaacccgttgtataccccgcgtgagcttgagcatcagcttaacgatagcggcgcatcggcgattgttatcgtgtctaactttgctcacacactggaaaaagtggttgataaaaccgccgttcagcacgtaattctgacccgtatgggcgatcagctatctacggcaaaaggcacggtagtcaatttcgttgttaaatacatcaagcgtttggtgccgaaataccatctgccagatgccatttcatttcgtagcgcactgcataacggctaccggatgcagtacgtcaaacccgaactggtgccggaagatttagcttttctgcaatacaccggcggcaccactggtgtggcgaaaggcgcgatgctgactcaccgcaatatgctggcgaacctggaacaggttaacgcgacctatggtccgctgttgcatccgggcaaagagctggtggtgacggcgctgccgctgtatcacatttttgccctgaccattaactgcctgctgtttatcgaactgggtgggcagaacctgcttatcactaacccgcgcgatattccagggttggtaaaagagttagcgaaatatccgtttaccgctatcacgggcgttaacaccttgttcaatgcgttgctgaacaataaagagttccagcagctggatttctccagtctgcatctttccgcaggcggtgggatgccagtgcagcaagtggtggcagagcgttgggtgaaactgaccggacagtatctgctggaaggctatggccttaccgagtgtgcgccgctggtcagcgttaacccatatgatattgattatcatagtggtagcatcggtttgccggtgccgtcgacggaagccaaactggtggatgatgatgataatgaagtaccaccaggtcaaccgggtgagctttgtgtcaaaggaccgcaggtgatgctgggttactggcagcgtcccgatgctaccgatgaaatcatcaaaaatggctggttacacaccggcgacatcgcggtaatggatgaagaaggattcctgcgcattgtcgatcgtaaaaaagacatgattctggtttccggttttaacgtctatcccaacgagattgaagatgtcgtcatgcagcatcctggcgtacaggaagtcgcggctgttggcgtaccttccggctccagtggtgaagcggtgaaaatcttcgtagtgaaaaaagatccatcgcttaccgaagagtcactggtgactttttgccgccgtcagctcacgggatacaaagtaccgaagctggtggagtttcgtgatgagttaccgaaatctaacgtcggaaaaattttgcgacgagaattacgtgacgaagcgcgcggcaaagtggacaataaagcctga

SEQ ID NO: 71 - DNA, 34 bp, Artificial Sequence
  primer
acaggaggtaaaacatatgcgtcctctgcacccg

SEQ ID NO: 72 - DNA, 44 bp, Artificial Sequence
  primer
gtttctttaccagactcgagattgttttctctttagtgggcgtc

SEQ ID NO: 73 - DNA, 32 bp, Artificial Sequence
  primer
acaggaggtaaaacatatgaaagcgctgtccc

SEQ ID NO: 74 - DNA, 41 bp, Artificial Sequence
  primer
gtttctttaccagactcgagattgttttctctttagtgggc

SEQ ID NO: 75 - DNA, 7141 bp, Artificial Sequence
  vector
cgggatctcgacgctctcccttatgcgactcctgcgtttagggaaagagcatttgtcagaatatttaagggcgcctgtcactttgcttgatatatgagaattatttaaccttataaatgagaaaaaagcaacgcactttaaataagatacgttgctttttcgattgatgaacacctataattaaactattcatctattatttatgattttttgtatatacaatatttctagtttgttaaagagaattaagaaaataaatctcgaaaataataaagggaaaatcagtttttgatatcaaaattatacatgtcaacgataatacaaaatataatacaaactataagatgttatcagtatttattatgcatttagaataccttttgtgtcgcccttattcgactccctatagaagttcctattctctagaaagtataggaacttcccttcattttggatccaattgtgagcggataacaattacgagcttcatgcacagtgatcgacgctgttgacaattaatcatcggctcgtataatgtgtggatgtggaattgtgagcgctcacaattccacaacggtttccctctagaaataattttgtttaacaggaggtaaaacatatgcgtcctctgcacccgatcgacttcatttttctgtcgctggagaagcgccagcagcctatgcatgtcggtggcctgttcttgtttcaaattccggataatgcgccggacacctttatccaagacctggtgaatgatatccgcattagcaaatctattccggtcccgccattcaacaacaaactgaacggcctgttttgggacgaggacgaggaatttgatctggatcaccattttcgtcacatcgcattgccgcacccaggtcgtattcgtgaactgctgatctacattagccaagagcacagcaccttgctggatcgcgccaagccgctgtggacgtgcaacattattgagggcattgaaggtaatcgttttgcgatgtatttcaagattcaccacgcgatggttgatggtgttgctggtatgcgtctgatcgaaaagagcctgtctcacgatgtgaccgagaaaagcatcgtgccgccgtggtgtgtggagggtaagcgtgctaaacgcctgcgtgaaccgaaaacgggtaagatcaaaaagattatgtccggtatcaaatctcagctgcaagcaactccgaccgtgatccaggaactgtcccagaccgtctttaaggacatcggtcgcaaccctgatcacgtcagcagcttccaggcaccgtgctccattctgaatcagcgtgtcagcagcagccgtcgctttgcggcgcaaagcttcgacctggatcgcttccgtaacatcgccaaaagcctgaatgtcaccattaacgacgttgttctggcggtgtgttccggcgctctgcgtgcgtacctgatgagccataatagcctgccgagcaaaccgttgattgcgatggtgccggcaagcattcgtaatgacgacagcgacgttagcaaccgtattacgatgatcctggcgaatctggcaacccataaagatgatccattgcagcgtctggaaatcattcgtcgcagcgtccaaaacagcaagcagcgtttcaagcgcatgacgagcgaccagatcctgaactattcggccgtggtttacggtccggcaggcctgaacatcatcagcggtatgatgccgaaacgtcaagcgttcaatctggttatttctaacgtcccgggtccgcgcgagccgttgtattggaatggcgcgaaactggatgctctgtacccggccagcattgttctggatggtcaggccctgaatatcaccatgacgtcctacttggacaagttggaggttggcctgatcgcgtgccgcaatgccctgccgcgtatgcagaacttgctgacccatctggaggaagagatccaactgttcgaaggcgtgattgcaaagcaagaggacatcaaaacggcgaactaagcgttaagtctgagaggtgaagaattgaagaaggtttggcttaaccgttatcccgcggacgttccgacggagatcaaccctgaccgttatcaatctctggtagatatgtttgagcagtcggtcgcgcgctacgccgatcaacctgcgtttgtgaatatgggggaggtaatgaccttccgcaagctggaagaacgcagtcgcgcgtttgccgcttatttgcaacaagggttggggctgaagaaaggcgatcgcgttgcgttgatgatgcctaatttattgcaatatccggtggcgctgtttggcattttgcgtgccgggatgatcgtcgtaaacgttaacccgttgtataccccgcgtgagcttgagcatcagcttaacgatagcggcgcatcggcgattgttatcgtgtctaactttgctcacacactggaaaaagtggttgataaaaccgccgttcagcacgtaattctgacccgtatgggcgatcagctatctacggcaaaaggcacggtagtcaatttcgttgttaaatacatcaagcgtttggtgccgaaataccatctgccagatgccatttcatttcgtagcgcactgcataacggctaccggatgcagtacgtcaaacccgaactggtgccggaagatttagcttttctgcaatacaccggcggcaccactggtgtggcgaaaggcgcgatgctgactcaccgcaatatgctggcgaacctggaacaggttaacgcgacctatggtccgctgttgcatccgggcaaagagctggtggtgacggcgctgccgctgtatcacatttttgccctgaccattaactgcctgctgtttatcgaactgggtgggcagaacctgcttatcactaacccgcgcgatattccagggttggtaaaagagttagcgaaatatccgtttaccgctatcacgggcgttaacaccttgttcaatgcgttgctgaacaataaagagttccagcagctggatttctccagtctgcatctttccgcaggcggtgggatgccagtgcagcaagtggtggcagagcgttgggtgaaactgaccggacagtatctgctggaaggctatggccttaccgagtgtgcgccgctggtcagcgttaacccatatgatattgattatcatagtggtagcatcggtttgccggtgccgtcgacggaagccaaactggtggatgatgatgataatgaagtaccaccaggtcaaccgggtgagctttgtgtcaaaggaccgcaggtgatgctgggttactggcagcgtcccgatgctaccgatgaaatcatcaaaaatggctggttacacaccggcgacatcgcggtaatggatgaagaaggattcctgcgcattgtcgatcgtaaaaaagacatgattctggtttccggttttaacgtctatcccaacgagattgaagatgtcgtcatgcagcatcctggcgtacaggaagtcgcggctgttggcgtaccttccggctccagtggtgaagcggtgaaaatcttcgtagtgaaaaaagatccatcgcttaccgaagagtcactggtgactttttgccgccgtcagctcacgggatacaaagtaccgaagctggtggagtttcgtgatgagttaccgaaatctaacgtcggaaaaattttgcgacgagaattacgtgacgaagcgcgcggcaaagtggacaataaagcctgagcgttaagtcagtcgtcagacgccggttaatccggcgttttttttgacgcccactaaagagaaaacaatctcgagtctggtaaagaaaccgctgctgcgaaatttgaacgccagcacatggactcgtctactagcgcagcttaattaacctaggctgctgccaccgctgagcaataactagcataaccccttggggcctctaaacgggtcttgaggggttttttgctgaaacctcaggcatttgagaagcacacggtcacactgcttccggtagtcaataaaccggtaaaccagcaatagacataagcggctatttaacgaccctgccctgaaccgacgaccgggtcatcgtggccggatcttgcggcccctcggcttgaacgaattgttagacattatttgccgactaccttggtgatctcgcctttcacgtagtggacaaattcttccaactgatctgcgcgcgaggccaagcgatcttcttcttgtccaagataagcctgtctagcttcaagtatgacgggctgatactgggccggcaggcgctccattgcccagtcggcagcgacatccttcggcgcgattttgccggttactgcgctgtaccaaatgcgggacaacgtaagcactacatttcgctcatcgccagcccagtcgggcggcgagttccatagcgttaaggtttcatttagcgcctcaaatagatcctgttcaggaaccggatcaaagagttcctccgccgctggacctaccaaggcaacgctatgttctcttgcttttgtcagcaagatagccagatcaatgtcgatcgtggctggctcgaagatacctgcaagaatgtcattgcgctgccattctccaaattgcagttcgcgcttagctggataacgccacggaatgatgtcgtcgtgcacaacaatggtgacttctacagcgcggagaatctcgctctctccaggggaagccgaagtttccaaaaggtcgttgatcaaagctcgccgcgttgtttcatcaagccttacggtcaccgtaaccagcaaatcaatatcactgtgtggcttcaggccgccatccactgcggagccgtacaaatgtacggccagcaacgtcggttcgagatggcgctcgatgacgccaactacctctgatagttgagtcgatacttcggcgatcaccgcttccctcatactcttcctttttcaatattattgaagcatttatcagggttattgtctcatgagcggatacatatttgaatgtatttagaaaaataaacaaatagctagctcactcggtcgctacgctccgggcgtgagactgcggcgggcgctgcggacacatacaaagttacccacagattccgtggataagcaggggactaacatgtgaggcaaaacagcagggccgcgccggtggcgtttttccataggctccgccctcctgccagagttcacataaacagacgcttttccggtgcatctgtgggagccgtgaggctcaaccatgaatctgacagtacgggcgaaacccgacaggacttaaagatccccaccgtttccggcgggtcgctccctcttgcgctctcctgttccgaccctgccgtttaccggatacctgttccgcctttctcccttacgggaagtgtggcgctttctcatagctcacacactggtatctcggctcggtgtaggtcgttcgctccaagctgggctgtaagcaagaactccccgttcagcccgactgctgcgccttatccggtaactgttcacttgagtccaacccggaaaagcacggtaaaacgccactggcagcagccattggtaactgggagttcgcagaggatttgtttagctaaacacgcggttgctcttgaagtgtgcgccaaagtccggctacactggaaggacagatttggttgctgtgctctgcgaaagccagttaccacggttaagcagttccccaactgacttaaccttcgatcaaaccacctccccaggtggttttttcgtttacagggcaaaagattacgcgcagaaaaaaaggatctcaagaagatcctttgatcttttctactgaaccgctctagatttcagtgcaatttatctcttcaaatgtagcacctgaagtcagccccatacgatataagttgtaattctcatgttagtcatgccccgcgcccaccggaaggagctgactgggttgaaggctctcaagggcatcggtcgagatcccggtgcctaatgagtgagctaacttacattaattgcgttgcgctcactgcccgctttccagtcgggaaacctgtcgtgccagctgcattaatgaatcggccaacgcgcggggagaggcggtttgcgtattgggcgccagggtggtttttcttttcaccagtgagacgggcaacagctgattgcccttcaccgcctggccctgagagagttgcagcaagcggtccacgctggtttgccccagcaggcgaaaatcctgtttgatggtggttaacggcgggatataacatgagctgtcttcggtatcgtcgtatcccactaccgagatgtccgcaccaacgcgcagcccggactcggtaatggcgcgcattgcgcccagcgccatctgatcgttggcaaccagcatcgcagtgggaacgatgccctcattcagcatttgcatggtttgttgaaaaccggacatggcactccagtcgccttcccgttccgctatcggctgaatttgattgcgagtgagatatttatgccagccagccagacgcagacgcgccgagacagaacttaatgggcccgctaacagcgcgatttgctggtgacccaatgcgaccagatgctccacgcccagtcgcgtaccgtcttcatgggagaaaataatactgttgatgggtgtctggtcagagacatcaagaaataacgccggaacattagtgcaggcagcttccacagcaatggcatcctggtcatccagcggatagttaatgatcagcccactgacgcgttgcgcgagaagattgtgcaccgccgctttacaggcttcgacgccgcttcgttctaccatcgacaccaccacgctggcacccagttgatcggcgcgagatttaatcgccgcgacaatttgcgacggcgcgtgcagggccagactggaggtggcaacgccaatcagcaacgactgtttgcccgccagttgttgtgccacgcggttgggaatgtaattcagctccgccatcgccgcttccactttttcccgcgttttcgcagaaacgtggctggcctggttcaccacgcgggaaacggtctgataagagacaccggcatactctgcgacatcgtataacgttactggtttcacattcaccaccctgaattgactctcttccgggcgctatcatgccataccgcgaaaggttttgcgccattcgatggtgtc

SEQ ID NO: 76 - DNA, 7138 bp, Artificial Sequence
  vector
cgggatctcgacgctctcccttatgcgactcctgcgtttagggaaagagcatttgtcagaatatttaagggcgcctgtcactttgcttgatatatgagaattatttaaccttataaatgagaaaaaagcaacgcactttaaataagatacgttgctttttcgattgatgaacacctataattaaactattcatctattatttatgattttttgtatatacaatatttctagtttgttaaagagaattaagaaaataaatctcgaaaataataaagggaaaatcagtttttgatatcaaaattatacatgtcaacgataatacaaaatataatacaaactataagatgttatcagtatttattatgcatttagaataccttttgtgtcgcccttattcgactccctatagaagttcctattctctagaaagtataggaacttcccttcattttggatccaattgtgagcggataacaattacgagcttcatgcacagtgatcgacgctgttgacaattaatcatcggctcgtataatgtgtggatgtggaattgtgagcgctcacaattccacaacggtttccctctagaaataattttgtttaacaggaggtaaaacatatgaaagcgctgtccccggtggatcagctgttcctgtggctggagaaacgtcagcaaccgatgcatgttggtggtctgcagctgtttagcttcccagagggtgcgggtcctaagtacgttagcgagttggctcagcaaatgcgtgactactgtcacccggtggccccgttcaatcagcgcctgacccgtcgcctgggtcaatactattggacgcgcgacaaacaatttgacattgaccaccattttcgccatgaagcgctgccgaagccgggtcgcattcgcgaactgctgtccttggttagcgcggagcacagcaatctgttggaccgcgagcgccctatgtgggaagcgcacctgattgagggcatccgtggccgccaattcgctttgtactataagatccaccatagcgtgatggatggcatcagcgctatgcgcattgcgtctaaaacgctgagcaccgacccgtctgagcgcgaaatggcaccagcatgggccttcaataccaagaaacgtagccgtagcctgccttccaatccagttgatatggcgagcagcatggcccgtctgacggcttctatcagcaaacaggcggcgaccgttccgggtctggctcgtgaagtgtacaaggtcacccagaaagctaagaaggatgagaactacgtgagcatttttcaagcgccggataccatcttgaacaacaccattaccggttcccgtcgttttgcagcacagagctttccgctgccgcgtctgaaagttatcgcgaaggcgtataactgcaccatcaacaccgtcgtcctgtctatgtgtggccacgcgctgcgtgaatatctgattagccaacacgcactgccggatgagccgctgatcgcgatggtgccgatgagcctgcgtcaggacgacagcacgggtggtaatcagattggcatgatcctggccaacctgggcacccatatctgcgatccggcgaatcgtttgcgtgttattcacgactccgtcgaggaagcgaaatcgcgtttcagccagatgagcccggaggagatcctgaactttaccgcactgactatggccccgacgggcttgaatctgctgaccggcctggcaccgaaatggcgtgcgttcaacgtcgtcattagcaacattccgggtccgaaggaaccgctgtattggaatggcgcccagctgcaaggtgtgtacccggtaagcattgcgttggaccgtattgcactgaacatcacgctgactagctacgtggatcagatggagttcggtctgatcgcatgccgtcgcacgctgccgagcatgcaacgtctgctggattatctggaacaaagcattcgtgagttggaaatcggtgccggcatcaagtaagcgttaagtctgagaggtgaagaattgaagaaggtttggcttaaccgttatcccgcggacgttccgacggagatcaaccctgaccgttatcaatctctggtagatatgtttgagcagtcggtcgcgcgctacgccgatcaacctgcgtttgtgaatatgggggaggtaatgaccttccgcaagctggaagaacgcagtcgcgcgtttgccgcttatttgcaacaagggttggggctgaagaaaggcgatcgcgttgcgttgatgatgcctaatttattgcaatatccggtggcgctgtttggcattttgcgtgccgggatgatcgtcgtaaacgttaacccgttgtataccccgcgtgagcttgagcatcagcttaacgatagcggcgcatcggcgattgttatcgtgtctaactttgctcacacactggaaaaagtggttgataaaaccgccgttcagcacgtaattctgacccgtatgggcgatcagctatctacggcaaaaggcacggtagtcaatttcgttgttaaatacatcaagcgtttggtgccgaaataccatctgccagatgccatttcatttcgtagcgcactgcataacggctaccggatgcagtacgtcaaacccgaactggtgccggaagatttagcttttctgcaatacaccggcggcaccactggtgtggcgaaaggcgcgatgctgactcaccgcaatatgctggcgaacctggaacaggttaacgcgacctatggtccgctgttgcatccgggcaaagagctggtggtgacggcgctgccgctgtatcacatttttgccctgaccattaactgcctgctgtttatcgaactgggtgggcagaacctgcttatcactaacccgcgcgatattccagggttggtaaaagagttagcgaaatatccgtttaccgctatcacgggcgttaacaccttgttcaatgcgttgctgaacaataaagagttccagcagctggatttctccagtctgcatctttccgcaggcggtgggatgccagtgcagcaagtggtggcagagcgttgggtgaaactgaccggacagtatctgctggaaggctatggccttaccgagtgtgcgccgctggtcagcgttaacccatatgatattgattatcatagtggtagcatcggtttgccggtgccgtcgacggaagccaaactggtggatgatgatgataatgaagtaccaccaggtcaaccgggtgagctttgtgtcaaaggaccgcaggtgatgctgggttactggcagcgtcccgatgctaccgatgaaatcatcaaaaatggctggttacacaccggcgacatcgcggtaatggatgaagaaggattcctgcgcattgtcgatcgtaaaaaagacatgattctggtttccggttttaacgtctatcccaacgagattgaagatgtcgtcatgcagcatcctggcgtacaggaagtcgcggctgttggcgtaccttccggctccagtggtgaagcggtgaaaatcttcgtagtgaaaaaagatccatcgcttaccgaagagtcactggtgactttttgccgccgtcagctcacgggatacaaagtaccgaagctggtggagtttcgtgatgagttaccgaaatctaacgtcggaaaaattttgcgacgagaattacgtgacgaagcgcgcggcaaagtggacaataaagcctgagcgttaagtcagtcgtcagacgccggttaatccggcgttttttttgacgcccactaaagagaaaacaatctcgagtctggtaaagaaaccgctgctgcgaaatttgaacgccagcacatggactcgtctactagcgcagcttaattaacctaggctgctgccaccgctgagcaataactagcataaccccttggggcctctaaacgggtcttgaggggttttttgctgaaacctcaggcatttgagaagcacacggtcacactgcttccggtagtcaataaaccggtaaaccagcaatagacataagcggctatttaacgaccctgccctgaaccgacgaccgggtcatcgtggccggatcttgcggcccctcggcttgaacgaattgttagacattatttgccgactaccttggtgatctcgcctttcacgtagtggacaaattcttccaactgatctgcgcgcgaggccaagcgatcttcttcttgtccaagataagcctgtctagcttcaagtatgacgggctgatactgggccggcaggcgctccattgcccagtcggcagcgacatccttcggcgcgattttgccggttactgcgctgtaccaaatgcgggacaacgtaagcactacatttcgctcatcgccagcccagtcgggcggcgagttccatagcgttaaggtttcatttagcgcctcaaatagatcctgttcaggaaccggatcaaagagttcctccgccgctggacctaccaaggcaacgctatgttctcttgcttttgtcagcaagatagccagatcaatgtcgatcgtggctggctcgaagatacctgcaagaatgtcattgcgctgccattctccaaattgcagttcgcgcttagctggataacgccacggaatgatgtcgtcgtgcacaacaatggtgacttctacagcgcggagaatctcgctctctccaggggaagccgaagtttccaaaaggtcgttgatcaaagctcgccgcgttgtttcatcaagccttacggtcaccgtaaccagcaaatcaatatcactgtgtggcttcaggccgccatccactgcggagccgtacaaatgtacggccagcaacgtcggttcgagatggcgctcgatgacgccaactacctctgatagttgagtcgatacttcggcgatcaccgcttccctcatactcttcctttttcaatattattgaagcatttatcagggttattgtctcatgagcggatacatatttgaatgtatttagaaaaataaacaaatagctagctcactcggtcgctacgctccgggcgtgagactgcggcgggcgctgcggacacatacaaagttacccacagattccgtggataagcaggggactaacatgtgaggcaaaacagcagggccgcgccggtggcgtttttccataggctccgccctcctgccagagttcacataaacagacgcttttccggtgcatctgtgggagccgtgaggctcaaccatgaatctgacagtacgggcgaaacccgacaggacttaaagatccccaccgtttccggcgggtcgctccctcttgcgctctcctgttccgaccctgccgtttaccggatacctgttccgcctttctcccttacgggaagtgtggcgctttctcatagctcacacactggtatctcggctcggtgtaggtcgttcgctccaagctgggctgtaagcaagaactccccgttcagcccgactgctgcgccttatccggtaactgttcacttgagtccaacccggaaaagcacggtaaaacgccactggcagcagccattggtaactgggagttcgcagaggatttgtttagctaaacacgcggttgctcttgaagtgtgcgccaaagtccggctacactggaaggacagatttggttgctgtgctctgcgaaagccagttaccacggttaagcagttccccaactgacttaaccttcgatcaaaccacctccccaggtggttttttcgtttacagggcaaaagattacgcgcagaaaaaaaggatctcaagaagatcctttgatcttttctactgaaccgctctagatttcagtgcaatttatctcttcaaatgtagcacctgaagtcagccccatacgatataagttgtaattctcatgttagtcatgccccgcgcccaccggaaggagctgactgggttgaaggctctcaagggcatcggtcgagatcccggtgcctaatgagtgagctaacttacattaattgcgttgcgctcactgcccgctttccagtcgggaaacctgtcgtgccagctgcattaatgaatcggccaacgcgcggggagaggcggtttgcgtattgggcgccagggtggtttttcttttcaccagtgagacgggcaacagctgattgcccttcaccgcctggccctgagagagttgcagcaagcggtccacgctggtttgccccagcaggcgaaaatcctgtttgatggtggttaacggcgggatataacatgagctgtcttcggtatcgtcgtatcccactaccgagatgtccgcaccaacgcgcagcccggactcggtaatggcgcgcattgcgcccagcgccatctgatcgttggcaaccagcatcgcagtgggaacgatgccctcattcagcatttgcatggtttgttgaaaaccggacatggcactccagtcgccttcccgttccgctatcggctgaatttgattgcgagtgagatatttatgccagccagccagacgcagacgcgccgagacagaacttaatgggcccgctaacagcgcgatttgctggtgacccaatgcgaccagatgctccacgcccagtcgcgtaccgtcttcatgggagaaaataatactgttgatgggtgtctggtcagagacatcaagaaataacgccggaacattagtgcaggcagcttccacagcaatggcatcctggtcatccagcggatagttaatgatcagcccactgacgcgttgcgcgagaagattgtgcaccgccgctttacaggcttcgacgccgcttcgttctaccatcgacaccaccacgctggcacccagttgatcggcgcgagatttaatcgccgcgacaatttgcgacggcgcgtgcagggccagactggaggtggcaacgccaatcagcaacgactgtttgcccgccagttgttgtgccacgcggttgggaatgtaattcagctccgccatcgccgcttccactttttcccgcgttttcgcagaaacgtggctggcctggttcaccacgcgggaaacggtctgataagagacaccggcatactctgcgacatcgtataacgttactggtttcacattcaccaccctgaattgactctcttccgggcgctatcatgccataccgcgaaaggttttgcgccattcgatggtgtc

SEQ ID NO: 77 - DNA, 888 bp, Acinetobacter sp. M-1
  CDS (1)..(888)
atgaatgcaaaactcaaaaaactttttcagcaaaaagtcgacggtaaaacaatcattgtcacaggagcatcaagtggtattggtttaacggtttcaaaataccttgctcaagcaggtgctcatgtcttattgctcgctcgtactaaagagaagttagatgaggtcaaagcagagatcgaggctgaaggtggaaaagcgaccgtatttccatgtgatctcaatgatatggaatctattgatgccgtttcaaaagaaatcttagcagcagtagatcacattgatattcttgtaaataacgcaggacgttcaatccgtcgtgcggtacatgagtcagttgatcgtttccatgacttcgaacgtaccatgcagttaaattactttggtgcagtacgtttagtcttgaatgttttaccgcacatgatgcagcgtaaagacggtcaaatcattaacatcagctcaattggtgttcttgccaacgcaactcgcttttctgcttacgttgcgtctaaagctgcattggatgcatttagtcgttgtttatctgcggaagttcactcacacaaaattgcgattacctctatttatatgcctttggtccgcacaccaatgattgcaccaaccaaaatttataaatatgtaccaacgctttcacctgaagaagcagccgatttaattgcttatgcaatcgtgaagcgtccgaaaaagatcgcgacgaacttaggtcgccttgcttcgattacttatgcgattgcaccagacattaacaacattttaatgtcgattggtttcaacttattcccaagttctaccgcgtctgttggtgagcaagagaagttgaatttaattcaacgtgcctatgcacgtttgttcccaggcgaacactggtaa

SEQ ID NO: 78 - protein, 295 aa, Acinetobacter sp. M-1
MNAKLKKLFQQKVDGKTIIVTGASSGIGLTVSKYLAQAGAHVLLLARTKEKLDEVKAEIEAEGGKATVFPCDLNDMESIDAVSKEILAAVDHIDILVNNAGRSIRRAVHESVDRFHDFERTMQLNYFGAVRLVLNVLPHMMQRKDGQIINISSIGVLANATRFSAYVASKAALDAFSRCLSAEVHSHKIAITSIYMPLVRTPMIAPTKIYKYVPTLSPEEAADLIAYAIVKRPKKIATNLGRLASITYAIAPDINNILMSIGFNLFPSSTASVGEQEKLNLIQRAYARLFPGEHW

SEQ ID NO: 79 - DNA, 888 bp, Acinetobacter sp. ADP1
  CDS (1)..(888)
gtgaacaaaaaacttgaagctctcttccgagagaatgtaaaaggtaaagtggctttgatcactggtgcatctagtggaatcggtttgacgattgcaaaaagaattgctgcggcaggtgctcatgtattattggttgcccgaacccaagaaacactggaagaagtgaaagctgcaattgaacagcaagggggacaggcctctatttttccttgtgacctgactgacatgaatgcgattgaccagttatcacaacaaattatggccagtgtcgatcatgtcgatttcctgatcaataatgcagggcgttcgattcgccgtgccgtacacgagtcgtttgatcgcttccatgattttgaacgcaccatgcagctgaattactttggtgcggtacgtttagtgttaaatttactgccacatatgattaagcgtaaaaatggccagatcatcaatatcagctctattggtgtattggccaatgcgacccgtttttctgcttatgtcgcgtctaaagctgcgctggatgccttcagtcgctgtctttcagccgaggtactcaagcataaaatctcaattacctcgatttatatgccattggtgcgtaccccaatgatcgcacccaccaaaatttataaatacgtgcccacgctttccccagaagaagccgcagatctcattgtctacgccattgtgaaacgtccaaaacgtattgcgacgcacttgggtcgtctggcgtcaattacctatgccatcgcaccagacatcaataatattctgatgtcgattggatttaacctattcccaagctcaacggctgcactgggtgaacaggaaaaattgaatctgctacaacgtgcctatgcccgcttgttcccaggcgaacactggtaa

SEQ ID NO: 80 - protein, 295 aa, Acinetobacter sp. ADP1
VNKKLEALFRENVKGKVALITGASSGIGLTIAKRIAAAGAHVLLVARTQETLEEVKAAIEQQGGQASIFPCDLTDMNAIDQLSQQIMASVDHVDFLINNAGRSIRRAVHESFDRFHDFERTMQLNYFGAVRLVLNLLPHMIKRKNGQIINISSIGVLANATRFSAYVASKAALDAFSRCLSAEVLKHKISITSIYMPLVRTPMIAPTKIYKYVPTLSPEEAADLIVYAIVKRPKRIATHLGRLASITYAIAPDINNILMSIGFNLFPSSTAALGEQEKLNLLQRAYARLFPGEHW

SEQ ID NO: 81 - DNA, 912 bp, Acinetobacter sp. ADP1
  CDS (1)..(912)
ttgatctcgatccgtgaaaaacgtgttaacaagaaattggaggccctgtttcgtgagaatgtcaaaggcaaggttgccctgatcacgggtgctagcagcggcatcggcctgacgattgccaaacgcattgctgcggcaggtgcacatgttctgttggtcgcgcgcacccaggaaaccctggaagaagtgaaggcagcaatcgagcaacagggtggccaggccagcattttcccgtgtgacctgaccgatatgaatgcgattgatcagctgagccaacagattatggcatccgtcgaccacgtagattttctgatcaacaatgccggtcgcagcattcgtcgcgcagtgcacgaaagcttcgaccgttttcatgatttcgagcgtacgatgcaattgaactacttcggtgcggtgcgtctggtcctgaacctgctgccgcacatgatcaaacgtaagaacggtcaaatcatcaatatcagcagcatcggcgtgctggcgaatgcgactcgctttagcgcgtacgttgcgagcaaagcagcgctggatgcgttttctcgttgcctgagcgcagaagttttgaaacataagattagcatcacgagcatttacatgccgttggtgcgtaccccgatgatcgccccgaccaaaatctataagtatgtgccgacgctgagcccggaagaggcagctgacctgattgtctacgctattgttaaacgtccaaagcgtattgcgacccacctgggtcgcttggcgtccatcacctacgcgattgcgccggacattaacaatattctgatgtccattggtttcaacctgttccctagctctaccgcggctctgggcgagcaggagaagctgaatctgctgcaacgtgcctatgcgcgcctgttcccgggtgagcactggtga

SEQ ID NO: 82 - protein, 303 aa, Acinetobacter sp. ADP1
LISIREKRVNKKLEALFRENVKGKVALITGASSGIGLTIAKRIAAAGAHVLLVARTQETLEEVKAAIEQQGGQASIFPCDLTDMNAIDQLSQQIMASVDHVDFLINNAGRSIRRAVHESFDRFHDFERTMQLNYFGAVRLVLNLLPHMIKRKNGQIINISSIGVLANATRFSAYVASKAALDAFSRCLSAEVLKHKISITSIYMPLVRTPMIAPTKIYKYVPTLSPEEAADLIVYAIVKRPKRIATHLGRLASITYAIAPDINNILMSIGFNLFPSSTAALGEQEKLNLLQRAYARLFPGEHW

SEQ ID NO: 83 - DNA, 1542 bp, Marinobacter aquaeolei VT8
  CDS (1)..(1542)
atggcaattcagcaggtacatcacgcggacacgagcagcagcaaagtattgggtcaactgcgtggcaagcgtgtcctgattacgggcaccacgggtttcctgggtaaggtcgtgctggagcgcttgattcgcgctgtgccggacattggtgcgatctatttgttgatccgtggtaataagcgtcacccggatgcacgttctcgctttttggaagagatcgcgaccagctcggtgttcgatcgcctgcgtgaagcagactccgagggttttgacgcattcctggaagagcgcattcactgtgtgactggcgaggtcacggaagcaggttttggcatcggccaagaggactaccgcaaactggcgaccgaattggacgcggtgattaacagcgcagcgagcgtgaactttcgtgaagaactggacaaggcgctggcgatcaacactctgtgcctgcgcaatatcgcgggtatggtggatctgaatccaaaactggcggtcctgcaagttagcacttgctatgtgaacggtatgaacagcggtcaagttaccgaaagcgtgatcaagccggcaggtgaagcggttccgcgtagcccggatggtttttacgagattgaagagctggtgcgcctgctgcaggacaaaatcgaggacgttcaggctcgttatagcggcaaggtcctggagcgtaagctggttgatctgggcattcgtgaagcgaatcgttatggctggagcgacacgtacacgtttaccaagtggctgggtgagcagctgttgatgaaagcgctgaatggtcgcaccttgaccatcctgcgtccgagcattattgagtctgccctggaagaacctgcgcctggctggatcgagggtgtgaaggttgcagacgcaatcattctggcctatgcgcgtgagaaggttaccctgttcccgggtaagcgtagcggtattatcgatgtcatcccggttgacctggtcgccaacagcattattctgagcctggcggaagcgctgggcgagccaggccgtcgccgcatctatcaatgctgttctggtggtggtaacccgatcagcctgggtgagttcatcgaccatctgatggccgagagcaaagcaaattacgccgcatacgatcacctgttctaccgtcagccgtccaaaccgtttttggcggtcaatcgcgcgctgttcgatctggttattagcggtgttcgtctgccgctgagcctgacggatcgcgttctgaagctgttgggtaactcccgtgatctgaaaatgctgcgcaatctggacaccacccaatccctggccaccattttcggcttctataccgctccggactacatcttccgtaatgatgaactgatggccctggccaaccgtatgggcgaggtcgataaaggcctgtttccggttgatgcgcgtctgattgactgggagctgtacctgcgtaaaatccatctggctggcctgaaccgttacgcattgaaagaacgtaaagtctactcgctgaaaaccgctcgtcagcgcaaaaaggccgcgtaa

SEQ ID NO: 84 - protein, 513 aa, Marinobacter aquaeolei VT8
MAIQQVHHADTSSSKVLGQLRGKRVLITGTTGFLGKVVLERLIRAVPDIGAIYLLIRGNKRHPDARSRFLEEIATSSVFDRLREADSEGFDAFLEERIHCVTGEVTEAGFGIGQEDYRKLATELDAVINSAASVNFREELDKALAINTLCLRNIAGMVDLNPKLAVLQVSTCYVNGMNSGQVTESVIKPAGEAVPRSPDGFYEIEELVRLLQDKIEDVQARYSGKVLERKLVDLGIREANRYGWSDTYTFTKWLGEQLLMKALNGRTLTILRPSIIESALEEPAPGWIEGVKVADAIILAYAREKVTLFPGKRSGIIDVIPVDLVANSIILSLAEALGEPGRRRIYQCCSGGGNPISLGEFIDHLMAESKANYAAYDHLFYRQPSKPFLAVNRALFDLVISGVRLPLSLTDRVLKLLGNSRDLKMLRNLDTTQSLATIFGFYTAPDYIFRNDELMALANRMGEVDKGLFPVDARLIDWELYLRKIHLAGLNRYALKERKVYSLKTARQRKKAA

SEQ ID NO: 85 - DNA, 3580 bp, Photorhabdus luminescens
atgacgaaaaagattagcttcatcatcaatggccaagtagagatttttccggaaagcgatgatctggtccaaagcatcaatttcggtgacaacagcgtttatctgccgatcctgaacgactcccacgtcaaaaacattatcgactgtaatggcaataatgaattgcgtctgcacaacatcgtcaacttcctgtataccgtgggtcaacgttggaaaaacgaagaatattcgcgtcgccgtacctatatccgcgacctgaaaaagtacatgggttacagcgaagaaatggcgaaactggaagccaactggattagcatgattttgtgcagcaagggtggtctgtacgacgtggtggaaaatgagctgggcagccgtcacatcatggatgagtggctgccgcaggacgagagctacgtgcgtgccttcccgaaaggcaaaagcgtgcacctgttggcaggtaacgtcccgttgtctggcattatgtccatcttgcgtgctattctgaccaaaaaccaatgcattatcaaaacgagcagcaccgacccttttacggccaatgcactggcattgtcgtttatcgacgtggacccgaatcacccgattactcgcagcctgtcggtgatttactggccgcatcagggcgacacctctctggcaaaagagattatgcgccacgcagacgttatcgtcgcttggggtggtccagatgctattaactgggcggtggagcacgctccgtcttacgccgatgtgatcaaattcggtagcaagaagtctctgtgtattatcgacaatccggttgacctgacctctgctgcaacgggtgccgctcatgatgtgtgcttctacgatcagcgtgcctgcttttccgcgcaaaacatctactatatgggcaatcattacgaagagttcaaattggctctgattgaaaagctgaatctgtatgcacatatcctgccgaacgcgaagaaagattttgatgagaaagcggcctacagcctggttcaaaaagaatcgctgttcgctggtctgaaagttgaagtagacattcaccagcgttggatgatcattgagagcaatgctggtgtggagtttaatcagccgctgggccgttgcgtgtatctgcaccatgttgataacattgagcagattctgccgtatgttcagaaaaacaaaacgcagaccatcagcatctttccgtgggaaagcagcttcaagtatcgtgatgccttggcgctgaaaggcgccgagcgcattgtcgaagcgggtatgaacaacattttccgcgtgggtggcagccatgacggtatgcgtccgctgcaacgtctggttacgtacatcagccacgaacgcccaagcaactataccgccaaggacgttgcggttgagatcgaacaaacccgctttttggaagaagataagtttctggtctttgttccataaaggaggtaaaaaaaatggagaacgaaagcaaatacaaaactattgaccatgtgatctgtgttgagggtaataagaagattcatgtctgggaaacgctgccggaagagaatagcccgaagcgcaaaaacgcgattatcatcgcgtccggttttgctcgccgtatggaccactttgcgggtttggctgagtacttgtcccgtaatggctttcacgttatccgttacgatagcctgcatcacgtgggtctgagcagcggtacgattgatgaatttaccatgtctattggcaaacagtcgctgctggcggtcgtggattggttgaccacgcgcaagatcaacaattttggtatgctggcgagcagcctgagcgcacgtattgcctatgcgagcttgagcgagatcaacgcctcgttcctgatcaccgcagtgggtgttgttaacttgcgttatagcctggaacgtgcactgggcttcgattatctgagcttgccaatcaatgagctgccagataatctggattttgagggtcataagctgggtgccgaggtgtttgcacgcgactgcctggactttggttgggaggatctggcaagcaccatcaataacatgatgtacctggacatcccattcattgcgttcacggccaacaatgataactgggtcaagcaggacgaagttattacgctgttgagcaatattcgtagcaatcgctgcaagatttactccctgctgggttcttctcacgacctgtcggagaacttggtggttctgcgtaatttctatcaatctgtgaccaaagcggcgattgcgatggacaatgatcacctggatattgacgttgacatcacggaaccgtccttcgagcacctgacgattgcgaccgtgaacgaacgtcgtatgcgtatcgagatcgaaaatcaggcgattagcctgagctaaaggaggtaaaaaaaatgaagggtatcaaagaatacgacagcagcgccgcaattctgagcaacatcattctgcgtagcaagacgggtatgaccagctacgtggacaagcaggaaatcaccgcttctagcgaaatcgacgatttgattttcagcagcgatcctctggtttggagctacgatgagcaagagaagatccgtaaaaagttggtcctggatgctttccgtaaccattacaagcactgtcgtgagtaccgtcactactgccaggcgcacaaggttgatgacaatatcactgaaattgacgacatcccggtctttcctacgtcggtgttcaagttcacgcgcctgctgacctctcaggaaaacgagatcgagagctggttcaccagctcgggtacgaacggtctgaaaagccaggttgcacgtgaccgcctgtccattgaacgtctgctgggctcggtgagctatggtatgaaatatgtcggtagctggtttgaccatcaaatcgagctggtaaacttgggtccggatcgtttcaatgcacataacatctggttcaagtacgtaatgagcctggtggaactgctgtacccgacgactttcaccgtcaccgaagagcgcatcgactttgtgaaaaccctgaactctctggaacgcatcaagaatcaaggtaaggacttgtgcctgattggcagcccgtacttcatttacctgctgtgtcactacatgaaagacaagaagatcagcttcagcggtgacaagagcttgtatatcatcacgggcggtggctggaaaagctacgagaaagaaagcctgaagcgtgacgactttaaccatctgctgtttgataccttcaatctgagcgacattagccagattcgtgacatctttaatcaagtcgagctgaacacttgtttcttcgaggatgaaatgcagcgtaaacacgtcccgccgtgggtgtatgcacgtgccctggacccggaaaccttgaagccggtcccggacggcaccccgggtttgatgtcctacatggacgccagcgcgaccagctatccggcgttcatcgttaccgatgacgtgggcatcatctcgcgcgaatacggcaaatacccgggtgttttggtcgagattctgcgtcgcgtgaacacccgtacccaaaagggttgcgcgttgagcctgaccgaggcgttcgatagctaa

SEQ ID NO: 86 - DNA, 37 bp, Artificial Sequence
  primer
ttttctaaggtacccgataacaattacgagcttcatg

SEQ ID NO: 87 - DNA, 28 bp, Artificial Sequence
  primer
ctccttcagctcaggctttattgtccac

SEQ ID NO: 88 - DNA, 25 bp, Artificial Sequence
  primer
ctccttcagctcaggctttattgtc

SEQ ID NO: 89 - DNA, 26 bp, Artificial Sequence
  primer
tccttctcgctcaggctttattgtcc

SEQ ID NO: 90 - DNA, 25 bp, Artificial Sequence
  primer
cctgattggctcaggctttattgtc

SEQ ID NO: 91 - DNA, 29 bp, Artificial Sequence
  primer
acctcctagttttacctcctgttaaacaa

SEQ ID NO: 92 - DNA, 28 bp, Artificial Sequence
  primer
cctgagctgaaggagttacagtttgatc

SEQ ID NO: 93 - DNA, 33 bp, Artificial Sequence
  primer
gtttctttaccagacttatcaccagtgctcacc

SEQ ID NO: 94 - DNA, 29 bp, Artificial Sequence
  primer
cctgagctgaaggagttacagtatgaatg

SEQ ID NO: 95 - DNA, 31 bp, Artificial Sequence
  primer
gtttctttaccagacttattaccagtgttcg

SEQ ID NO: 96 - DNA, 27 bp, Artificial Sequence
  primer
cctgagcgagaaggagttctatcatgg

SEQ ID NO: 97 - DNA, 35 bp, Artificial Sequence
  primer
gtttctttaccagactcattacgcggcctttttgc

SEQ ID NO: 98 - DNA, 27 bp, Artificial Sequence
  primer
cctgagccaatcagggaaaaacgcgtg

SEQ ID NO: 99 - DNA, 35 bp, Artificial Sequence
  primer
gtttctttaccagacctctcggtatgagaggcttc

SEQ ID NO: 100 - DNA, 28 bp, Artificial Sequence
  primer
gtaaaactaggaggtaaaaaaaatgacg

SEQ ID NO: 101 - DNA, 38 bp, Artificial Sequence
  primer
gtttctttaccagacttagctatcgaacgaacgcctcg

SEQ ID NO: 102 - DNA, 7712 bp, Artificial Sequence
  vector
ggggaattgtgagcggataacaattcccctgtagaaataattttgtttaactttaataaggagatataccatgggcagcagccatcaccatcatcaccacagccaggatccttcaatattattgaagcatttatcagggttattgtctcatgagcggatacatatttgaatgtatttagaaaaataaacaaataggggtcagtgttacaaccaattaaccaattctgaacattatcgcgagcccatttatacctgaatatggctcataacaccccttgtttgcctggcggcagtagcgcggtggtcccacctgaccccatgccgaactcagaagtgaaacgccgtagcgccgatggtagtgtggggactccccatgcgagagtagggaactgccaggcatcaaataaaacgaaaggctcagtcgaaagactgggcctttcgcccgggctaattatggggtgtcgcccttattcgactctatagtgaagttcctattctctagaaagtataggaacttctgaagtggggatccggccggcctgcagccccgcagggcctgtctcggtcgatcattcagcccggctcatagatatgcgggcagtgagcgcaacgcaattaatgtaagttagctcactcattaggcaccccaggcttgacactttatgcttccggctcgtataatgtgtggaattgtgagcggataacaataacaatttcacacaggatctaggaaccaaggagagtggcatgtgagtttttctaattataaagtaatcgcgatgccggtgttggttgctaattttgttttgggggcggccactgcatgggcgaatgaaaattatccggcgaaatctgctggctataatcagggtgactgggtcgctagcttcaatttttctaaggtctatgtgggtgaggagcttggcgatctaaatgttggagggggggctttgccaaatgctgatgtaagtattggtaatgatacaacacttacgtttgatatcgcctattttgttagctcaaatatagcggtggatttttttgttggggtgccagctagggctaaatttcaaggtgagaaatcaatctcctcgctgggaagagtcagtgaagttgattacggccctgcaattctttcgcttcaatatcattacgatagctttgagcgactttatccatatgttggggttggtgttggtcgggtgctattttttgataaaaccgacggtgctttgagttcgtttgatattaaggataaatgggcgcctgcttttcaggttggccttagatatgaccttggtaactcatggatgctaaattcagatgtgcgttatattcctttcaaaacggacgtcacaggtactcttggcccggttcctgtttctactaaaattgaggttgatcctttcattctcagtcttggtgcgtcatatgttttctaaggtacccgataacaattacgagcttcatgcacagtgatcgacgctgttgacaattaatcatcggctcgtataatgtgtggatgtggaattgtgagcgctcacaattccacaacggtttccctctagaaataattttgtttaacaggaggtaaaacatatgttaacggcatgtatatcatttggggttgcgatgacgacgaacacgcattttagaggtgaagaattgaagaaggtttggcttaaccgttatcccgcggacgttccgacggagatcaaccctgaccgttatcaatctctggtagatatgtttgagcagtcggtcgcgcgctacgccgatcaacctgcgtttgtgaatatgggggaggtaatgaccttccgcaagctggaagaacgcagtcgcgcgtttgccgcttatttgcaacaagggttggggctgaagaaaggcgatcgcgttgcgttgatgatgcctaatttattgcaatatccggtggcgctgtttggcattttgcgtgccgggatgatcgtcgtaaacgttaacccgttgtataccccgcgtgagcttgagcatcagcttaacgatagcggcgcatcggcgattgttatcgtgtctaactttgctcacacactggaaaaagtggttgataaaaccgccgttcagcacgtaattctgacccgtatgggcgatcagctatctacggcaaaaggcacggtagtcaatttcgttgttaaatacatcaagcgtttggtgccgaaataccatctgccagatgccatttcatttcgtagcgcactgcataacggctaccggatgcagtacgtcaaacccgaactggtgccggaagatttagcttttctgcaatacaccggcggcaccactggtgtggcgaaaggcgcgatgctgactcaccgcaatatgctggcgaacctggaacaggttaacgcgacctatggtccgctgttgcatccgggcaaagagctggtggtgacggcgctgccgctgtatcacatttttgccctgaccattaactgcctgctgtttatcgaactgggtgggcagaacctgcttatcactaacccgcgcgatattccagggttggtaaaagagttagcgaaatatccgtttaccgctatcacgggcgttaacaccttgttcaatgcgttgctgaacaataaagagttccagcagctggatttctccagtctgcatctttccgcaggcggtgggatgccagtgcagcaagtggtggcagagcgttgggtgaaactgaccggacagtatctgctggaaggctatggccttaccgagtgtgcgccgctggtcagcgttaacccatatgatattgattatcatagtggtagcatcggtttgccggtgccgtcgacggaagccaaactggtggatgatgatgataatgaagtaccaccaggtcaaccgggtgagctttgtgtcaaaggaccgcaggtgatgctgggttactggcagcgtcccgatgctaccgatgaaatcatcaaaaatggctggttacacaccggcgacatcgcggtaatggatgaagaaggattcctgcgcattgtcgatcgtaaaaaagacatgattctggtttccggttttaacgtctatcccaacgagattgaagatgtcgtcatgcagcatcctggcgtacaggaagtcgcggctgttggcgtaccttccggctccagtggtgaagcggtgaaaatcttcgtagtgaaaaaagatccatcgcttaccgaagagtcactggtgactttttgccgccgtcagctcacgggatacaaagtaccgaagctggtggagtttcgtgatgagttaccgaaatctaacgtcggaaaaattttgcgacgagaattacgtgacgaagcgcgcggcaaagtggacaataaagcctgagccaatcagggaaaaacgcgtgaacaaaaaacttgaagctctcttccgagagaatgtaaaaggtaaagtggctttgatcactggtgcatctagtggaatcggtttgacgattgcaaaaagaattgctgcggcaggtgctcatgtattattggttgcccgaacccaagaaacactggaagaagtgaaagctgcaattgaacagcaagggggacaggcctctatttttccttgtgacctgactgacatgaatgcgattgaccagttatcacaacaaattatggccagtgtcgatcatgtcgatttcctgatcaataatgcagggcgttcgattcgccgtgccgtacacgagtcgtttgatcgcttccatgattttgaacgcaccatgcagctgaattactttggtgcggtacgtttagtgttaaatttactgccacatatgattaagcgtaaaaatggccagatcatcaatatcagctctattggtgtattggccaatgcgacccgtttttctgcttatgtcgcgtctaaagctgcgctggatgccttcagtcgctgtctttcagccgaggtactcaagcataaaatctcaattacctcgatttatatgccattggtgcgtaccccaatgatcgcacccaccaaaatttataaatacgtgcccacgctttccccagaagaagccgcagatctcattgtctacgccattgtgaaacgtccaaaacgtattgcgacgcacttgggtcgtctggcgtcaattacctatgccatcgcaccagacatcaataatattctgatgtcgattggatttaacctattcccaagctcaacggctgcactgggtgaacaggaaaaattgaatctgctacaacgtgcctatgcccgcttgttcccaggcgaacactggtaaaatttataaaagaagcctctcataccgagaggtctggtaaagaaaccgctgctgcgaaatttgaacgccagcacatggactcgtctactagcgcagcttaattaacctaggctgctgccaccgctgagcaataactagcataaccccttggggcctctaaacgggtcttgaggggttttttgctgaaacctcaggcatttgagaagcacacggtcacactgcttccggtagtcaataaaccggtaaaccagcaatagacataagcggctatttaacgaccctgccctgaaccgacgaccgggtcatcgtggccggatcttgcggcccctcggcttgaacgaattgttagacattatttgccgactaccttggtgatctcgcctttcacgtagtggacaaattcttccaactgatctgcgcgcgaggccaagcgatcttcttcttgtccaagataagcctgtctagcttcaagtatgacgggctgatactgggccggcaggcgctccattgcccagtcggcagcgacatccttcggcgcgattttgccggttactgcgctgtaccaaatgcgggacaacgtaagcactacatttcgctcatcgccagcccagtcgggcggcgagttccatagcgttaaggtttcatttagcgcctcaaatagatcctgttcaggaaccggatcaaagagttcctccgccgctggacctaccaaggcaacgctatgttctcttgcttttgtcagcaagatagccagatcaatgtcgatcgtggctggctcgaagatacctgcaagaatgtcattgcgctgccattctccaaattgcagttcgcgcttagctggataacgccacggaatgatgtcgtcgtgcacaacaatggtgacttctacagcgcggagaatctcgctctctccaggggaagccgaagtttccaaaaggtcgttgatcaaagctcgccgcgttgtttcatcaagccttacggtcaccgtaaccagcaaatcaatatcactgtgtggcttcaggccgccatccactgcggagccgtacaaatgtacggccagcaacgtcggttcgagatggcgctcgatgacgccaactacctctgatagttgagtcgatacttcggcgatcaccgcttccctcatactcttcctttttcaatattattgaagcatttatcagggttattgtctcatgagcggatacatatttgaatgtatttagaaaaataaacaaatagctagctcactcggtcgctacgctccgggcgtgagactgcggcgggcgctgcggacacatacaaagttacccacagattccgtggataagcaggggactaacatgtgaggcaaaacagcagggccgcgccggtggcgtttttccataggctccgccctcctgccagagttcacataaacagacgcttttccggtgcatctgtgggagccgtgaggctcaaccatgaatctgacagtacgggcgaaacccgacaggacttaaagatccccaccgtttccggcgggtcgctccctcttgcgctctcctgttccgaccctgccgtttaccggatacctgttccgcctttctcccttacgggaagtgtggcgctttctcatagctcacacactggtatctcggctcggtgtaggtcgttcgctccaagctgggctgtaagcaagaactccccgttcagcccgactgctgcgccttatccggtaactgttcacttgagtccaacccggaaaagcacggtaaaacgccactggcagcagccattggtaactgggagttcgcagaggatttgtttagctaaacacgcggttgctcttgaagtgtgcgccaaagtccggctacactggaaggacagatttggttgctgtgctctgcgaaagccagttaccacggttaagcagttccccaactgacttaaccttcgatcaaaccacctccccaggtggttttttcgtttacagggcaaaagattacgcgcagaaaaaaaggatctcaagaagatcctttgatcttttctactgaaccgctctagatttcagtgcaatttatctcttcaaatgtagcacctgaagtcagccccatacgatataagttgtaattctcatgttagtcatgccccgcgcccaccggaaggagctgactgggttgaaggctctcaagggcatcggtcgagatcccggtgcctaatgagtgagctaacttacattaattgcgttgcgctcactgcccgctttccagtcgggaaacctgtcgtgccagctgcattaatgaatcggccaacgcgcggggagaggcggtttgcgtattgggcgccagggtggtttttcttttcaccagtgagacgggcaacagctgattgcccttcaccgcctggccctgagagagttgcagcaagcggtccacgctggtttgccccagcaggcgaaaatcctgtttgatggtggttaacggcgggatataacatgagctgtcttcggtatcgtcgtatcccactaccgagatgtccgcaccaacgcgcagcccggactcggtaatggcgcgcattgcgcccagcgccatctgatcgttggcaaccagcatcgcagtgggaacgatgccctcattcagcatttgcatggtttgttgaaaaccggacatggcactccagtcgccttcccgttccgctatcggctgaatttgattgcgagtgagatatttatgccagccagccagacgcagacgcgccgagacagaacttaatgggcccgctaacagcgcgatttgctggtgacccaatgcgaccagatgctccacgcccagtcgcgtaccgtcttcatgggagaaaataatactgttgatgggtgtctggtcagagacatcaagaaataacgccggaacattagtgcaggcagcttccacagcaatggcatcctggtcatccagcggatagttaatgatcagcccactgacgcgttgcgcgagaagattgtgcaccgccgctttacaggcttcgacgccgcttcgttctaccatcgacaccaccacgctggcacccagttgatcggcgcgagatttaatcgccgcgacaatttgcgacggcgcgtgcagggccagactggaggtggcaacgccaatcagcaacgactgtttgcccgccagttgttgtgccacgcggttgggaatgtaattcagctccgccatcgccgcttccactttttcccgcgttttcgcagaaacgtggctggcctggttcaccacgcgggaaacggtctgataagagacaccggcatactctgcgacatcgtataacgttactggtttcacattcaccaccctgaattgactctcttccgggcgctatcatgccataccgcgaaaggttttgcgccattcgatggtgtccgggatctcgacgctctcccttatgcgactcctgcattaggaaattaatacgactcactata

SEQ ID NO: 103 - DNA, 7706 bp, Artificial Sequence
  vector
ggggaattgtgagcggataacaattcccctgtagaaataattttgtttaactttaataaggagatataccatgggcagcagccatcaccatcatcaccacagccaggatccttcaatattattgaagcatttatcagggttattgtctcatgagcggatacatatttgaatgtatttagaaaaataaacaaataggggtcagtgttacaaccaattaaccaattctgaacattatcgcgagcccatttatacctgaatatggctcataacaccccttgtttgcctggcggcagtagcgcggtggtcccacctgaccccatgccgaactcagaagtgaaacgccgtagcgccgatggtagtgtggggactccccatgcgagagtagggaactgccaggcatcaaataaaacgaaaggctcagtcgaaagactgggcctttcgcccgggctaattatggggtgtcgcccttattcgactctatagtgaagttcctattctctagaaagtataggaacttctgaagtggggatccggccggcctgcagccccgcagggcctgtctcggtcgatcattcagcccggctcatagatatgcgggcagtgagcgcaacgcaattaatgtaagttagctcactcattaggcaccccaggcttgacactttatgcttccggctcgtataatgtgtggaattgtgagcggataacaataacaatttcacacaggatctaggaaccaaggagagtggcatgtgagtttttctaattataaagtaatcgcgatgccggtgttggttgctaattttgttttgggggcggccactgcatgggcgaatgaaaattatccggcgaaatctgctggctataatcagggtgactgggtcgctagcttcaatttttctaaggtctatgtgggtgaggagcttggcgatctaaatgttggagggggggctttgccaaatgctgatgtaagtattggtaatgatacaacacttacgtttgatatcgcctattttgttagctcaaatatagcggtggatttttttgttggggtgccagctagggctaaatttcaaggtgagaaatcaatctcctcgctgggaagagtcagtgaagttgattacggccctgcaattctttcgcttcaatatcattacgatagctttgagcgactttatccatatgttggggttggtgttggtcgggtgctattttttgataaaaccgacggtgctttgagttcgtttgatattaaggataaatgggcgcctgcttttcaggttggccttagatatgaccttggtaactcatggatgctaaattcagatgtgcgttatattcctttcaaaacggacgtcacaggtactcttggcccggttcctgtttctactaaaattgaggttgatcctttcattctcagtcttggtgcgtcatatgttttctaaggtacccgataacaattacgagcttcatgcacagtgatcgacgctgttgacaattaatcatcggctcgtataatgtgtggatgtggaattgtgagcgctcacaattccacaacggtttccctctagaaataattttgtttaacaggaggtaaaacatatgttaacggcatgtatatcatttggggttgcgatgacgacgaacacgcattttagaggtgaagaattgaagaaggtttggcttaaccgttatcccgcggacgttccgacggagatcaaccctgaccgttatcaatctctggtagatatgtttgagcagtcggtcgcgcgctacgccgatcaacctgcgtttgtgaatatgggggaggtaatgaccttccgcaagctggaagaacgcagtcgcgcgtttgccgcttatttgcaacaagggttggggctgaagaaaggcgatcgcgttgcgttgatgatgcctaatttattgcaatatccggtggcgctgtttggcattttgcgtgccgggatgatcgtcgtaaacgttaacccgttgtataccccgcgtgagcttgagcatcagcttaacgatagcggcgcatcggcgattgttatcgtgtctaactttgctcacacactggaaaaagtggttgataaaaccgccgttcagcacgtaattctgacccgtatgggcgatcagctatctacggcaaaaggcacggtagtcaatttcgttgttaaatacatcaagcgtttggtgccgaaataccatctgccagatgccatttcatttcgtagcgcactgcataacggctaccggatgcagtacgtcaaacccgaactggtgccggaagatttagcttttctgcaatacaccggcggcaccactggtgtggcgaaaggcgcgatgctgactcaccgcaatatgctggcgaacctggaacaggttaacgcgacctatggtccgctgttgcatccgggcaaagagctggtggtgacggcgctgccgctgtatcacatttttgccctgaccattaactgcctgctgtttatcgaactgggtgggcagaacctgcttatcactaacccgcgcgatattccagggttggtaaaagagttagcgaaatatccgtttaccgctatcacgggcgttaacaccttgttcaatgcgttgctgaacaataaagagttccagcagctggatttctccagtctgcatctttccgcaggcggtgggatgccagtgcagcaagtggtggcagagcgttgggtgaaactgaccggacagtatctgctggaaggctatggccttaccgagtgtgcgccgctggtcagcgttaacccatatgatattgattatcatagtggtagcatcggtttgccggtgccgtcgacggaagccaaactggtggatgatgatgataatgaagtaccaccaggtcaaccgggtgagctttgtgtcaaaggaccgcaggtgatgctgggttactggcagcgtcccgatgctaccgatgaaatcatcaaaaatggctggttacacaccggcgacatcgcggtaatggatgaagaaggattcctgcgcattgtcgatcgtaaaaaagacatgattctggtttccggttttaacgtctatcccaacgagattgaagatgtcgtcatgcagcatcctggcgtacaggaagtcgcggctgttggcgtaccttccggctccagtggtgaagcggtgaaaatcttcgtagtgaaaaaagatccatcgcttaccgaagagtcactggtgactttttgccgccgtcagctcacgggatacaaagtaccgaagctggtggagtttcgtgatgagttaccgaaatctaacgtcggaaaaattttgcgacgagaattacgtgacgaagcgcgcggcaaagtggacaataaagcctgagctgaaggagttacagtttgatctcgatccgtgaaaaacgtgttaacaagaaattggaggccctgtttcgtgagaatgtcaaaggcaaggttgccctgatcacgggtgctagcagcggcatcggcctgacgattgccaaacgcattgctgcggcaggtgcacatgttctgttggtcgcgcgcacccaggaaaccctggaagaagtgaaggcagcaatcgagcaacagggtggccaggccagcattttcccgtgtgacctgaccgatatgaatgcgattgatcagctgagccaacagattatggcatccgtcgaccacgtagattttctgatcaacaatgccggtcgcagcattcgtcgcgcagtgcacgaaagcttcgaccgttttcatgatttcgagcgtacgatgcaattgaactacttcggtgcggtgcgtctggtcctgaacctgctgccgcacatgatcaaacgtaagaacggtcaaatcatcaatatcagcagcatcggcgtgctggcgaatgcgactcgctttagcgcgtacgttgcgagcaaagcagcgctggatgcgttttctcgttgcctgagcgcagaagttttgaaacataagattagcatcacgagcatttacatgccgttggtgcgtaccccgatgatcgccccgaccaaaatctataagtatgtgccgacgctgagcccggaagaggcagctgacctgattgtctacgctattgttaaacgtccaaagcgtattgcgacccacctgggtcgcttggcgtccatcacctacgcgattgcgccggacattaacaatattctgatgtccattggtttcaacctgttccctagctctaccgcggctctgggcgagcaggagaagctgaatctgctgcaacgtgcctatgcgcgcctgttcccgggtgagcactggtgataagtctggtaaagaaaccgctgctgcgaaatttgaacgccagcacatggactcgtctactagcgcagcttaattaacctaggctgctgccaccgctgagcaataactagcataaccccttggggcctctaaacgggtcttgaggggttttttgctgaaacctcaggcatttgagaagcacacggtcacactgcttccggtagtcaataaaccggtaaaccagcaatagacataagcggctatttaacgaccctgccctgaaccgacgaccgggtcatcgtggccggatcttgcggcccctcggcttgaacgaattgttagacattatttgccgactaccttggtgatctcgcctttcacgtagtggacaaattcttccaactgatctgcgcgcgaggccaagcgatcttcttcttgtccaagataagcctgtctagcttcaagtatgacgggctgatactgggccggcaggcgctccattgcccagtcggcagcgacatccttcggcgcgattttgccggttactgcgctgtaccaaatgcgggacaacgtaagcactacatttcgctcatcgccagcccagtcgggcggcgagttccatagcgttaaggtttcatttagcgcctcaaatagatcctgttcaggaaccggatcaaagagttcctccgccgctggacctaccaaggcaacgctatgttctcttgcttttgtcagcaagatagccagatcaatgtcgatcgtggctggctcgaagatacctgcaagaatgtcattgcgctgccattctccaaattgcagttcgcgcttagctggataacgccacggaatgatgtcgtcgtgcacaacaatggtgacttctacagcgcggagaatctcgctctctccaggggaagccgaagtttccaaaaggtcgttgatcaaagctcgccgcgttgtttcatcaagccttacggtcaccgtaaccagcaaatcaatatcactgtgtggcttcaggccgccatccactgcggagccgtacaaatgtacggccagcaacgtcggttcgagatggcgctcgatgacgccaactacctctgatagttgagtcgatacttcggcgatcaccgcttccctcatactcttcctttttcaatattattgaagcatttatcagggttattgtctcatgagcggatacatatttgaatgtatttagaaaaataaacaaatagctagctcactcggtcgctacgctccgggcgtgagactgcggcgggcgctgcggacacatacaaagttacccacagattccgtggataagcaggggactaacatgtgaggcaaaacagcagggccgcgccggtggcgtttttccataggctccgccctcctgccagagttcacataaacagacgcttttccggtgcatctgtgggagccgtgaggctcaaccatgaatctgacagtacgggcgaaacccgacaggacttaaagatccccaccgtttccggcgggtcgctccctcttgcgctctcctgttccgaccctgccgtttaccggatacctgttccgcctttctcccttacgggaagtgtggcgctttctcatagctcacacactggtatctcggctcggtgtaggtcgttcgctccaagctgggctgtaagcaagaactccccgttcagcccgactgctgcgccttatccggtaactgttcacttgagtccaacccggaaaagcacggtaaaacgccactggcagcagccattggtaactgggagttcgcagaggatttgtttagctaaacacgcggttgctcttgaagtgtgcgccaaagtccggctacactggaaggacagatttggttgctgtgctctgcgaaagccagttaccacggttaagcagttccccaactgacttaaccttcgatcaaaccacctccccaggtggttttttcgtttacagggcaaaagattacgcgcagaaaaaaaggatctcaagaagatcctttgatcttttctactgaaccgctctagatttcagtgcaatttatctcttcaaatgtagcacctgaagtcagccccatacgatataagttgtaattctcatgttagtcatgccccgcgcccaccggaaggagctgactgggttgaaggctctcaagggcatcggtcgagatcccggtgcctaatgagtgagctaacttacattaattgcgttgcgctcactgcccgctttccagtcgggaaacctgtcgtgccagctgcattaatgaatcggccaacgcgcggggagaggcggtttgcgtattgggcgccagggtggtttttcttttcaccagtgagacgggcaacagctgattgcccttcaccgcctggccctgagagagttgcagcaagcggtccacgctggtttgccccagcaggcgaaaatcctgtttgatggtggttaacggcgggatataacatgagctgtcttcggtatcgtcgtatcccactaccgagatgtccgcaccaacgcgcagcccggactcggtaatggcgcgcattgcgcccagcgccatctgatcgttggcaaccagcatcgcagtgggaacgatgccctcattcagcatttgcatggtttgttgaaaaccggacatggcactccagtcgccttcccgttccgctatcggctgaatttgattgcgagtgagatatttatgccagccagccagacgcagacgcgccgagacagaacttaatgggcccgctaacagcgcgatttgctggtgacccaatgcgaccagatgctccacgcccagtcgcgtaccgtcttcatgggagaaaataatactgttgatgggtgtctggtcagagacatcaagaaataacgccggaacattagtgcaggcagcttccacagcaatggcatcctggtcatccagcggatagttaatgatcagcccactgacgcgttgcgcgagaagattgtgcaccgccgctttacaggcttcgacgccgcttcgttctaccatcgacaccaccacgctggcacccagttgatcggcgcgagatttaatcgccgcgacaatttgcgacggcgcgtgcagggccagactggaggtggcaacgccaatcagcaacgactgtttgcccgccagttgttgtgccacgcggttgggaatgtaattcagctccgccatcgccgcttccactttttcccgcgttttcgcagaaacgtggctggcctggttcaccacgcgggaaacggtctgataagagacaccggcatactctgcgacatcgtataacgttactggtttcacattcaccaccctgaattgactctcttccgggcgctatcatgccataccgcgaaaggttttgcgccattcgatggtgtccgggatctcgacgctctcccttatgcgactcctgcattaggaaattaatacgactcactata

SEQ ID NO: 104 - DNA, 7682 bp, Artificial Sequence
  vector
ggggaattgtgagcggataacaattcccctgtagaaataattttgtttaactttaataaggagatataccatgggcagcagccatcaccatcatcaccacagccaggatccttcaatattattgaagcatttatcagggttattgtctcatgagcggatacatatttgaatgtatttagaaaaataaacaaataggggtcagtgttacaaccaattaaccaattctgaacattatcgcgagcccatttatacctgaatatggctcataacaccccttgtttgcctggcggcagtagcgcggtggtcccacctgaccccatgccgaactcagaagtgaaacgccgtagcgccgatggtagtgtggggactccccatgcgagagtagggaactgccaggcatcaaataaaacgaaaggctcagtcgaaagactgggcctttcgcccgggctaattatggggtgtcgcccttattcgactctatagtgaagttcctattctctagaaagtataggaacttctgaagtggggatccggccggcctgcagccccgcagggcctgtctcggtcgatcattcagcccggctcatagatatgcgggcagtgagcgcaacgcaattaatgtaagttagctcactcattaggcaccccaggcttgacactttatgcttccggctcgtataatgtgtggaattgtgagcggataacaataacaatttcacacaggatctaggaaccaaggagagtggcatgtgagtttttctaattataaagtaatcgcgatgccggtgttggttgctaattttgttttgggggcggccactgcatgggcgaatgaaaattatccggcgaaatctgctggctataatcagggtgactgggtcgctagcttcaatttttctaaggtctatgtgggtgaggagcttggcgatctaaatgttggagggggggctttgccaaatgctgatgtaagtattggtaatgatacaacacttacgtttgatatcgcctattttgttagctcaaatatagcggtggatttttttgttggggtgccagctagggctaaatttcaaggtgagaaatcaatctcctcgctgggaagagtcagtgaagttgattacggccctgcaattctttcgcttcaatatcattacgatagctttgagcgactttatccatatgttggggttggtgttggtcgggtgctattttttgataaaaccgacggtgctttgagttcgtttgatattaaggataaatgggcgcctgcttttcaggttggccttagatatgaccttggtaactcatggatgctaaattcagatgtgcgttatattcctttcaaaacggacgtcacaggtactcttggcccggttcctgtttctactaaaattgaggttgatcctttcattctcagtcttggtgcgtcatatgttttctaaggtacccgataacaattacgagcttcatgcacagtgatcgacgctgttgacaattaatcatcggctcgtataatgtgtggatgtggaattgtgagcgctcacaattccacaacggtttccctctagaaataattttgtttaacaggaggtaaaacatatgttaacggcatgtatatcatttggggttgcgatgacgacgaacacgcattttagaggtgaagaattgaagaaggtttggcttaaccgttatcccgcggacgttccgacggagatcaaccctgaccgttatcaatctctggtagatatgtttgagcagtcggtcgcgcgctacgccgatcaacctgcgtttgtgaatatgggggaggtaatgaccttccgcaagctggaagaacgcagtcgcgcgtttgccgcttatttgcaacaagggttggggctgaagaaaggcgatcgcgttgcgttgatgatgcctaatttattgcaatatccggtggcgctgtttggcattttgcgtgccgggatgatcgtcgtaaacgttaacccgttgtataccccgcgtgagcttgagcatcagcttaacgatagcggcgcatcggcgattgttatcgtgtctaactttgctcacacactggaaaaagtggttgataaaaccgccgttcagcacgtaattctgacccgtatgggcgatcagctatctacggcaaaaggcacggtagtcaatttcgttgttaaatacatcaagcgtttggtgccgaaataccatctgccagatgccatttcatttcgtagcgcactgcataacggctaccggatgcagtacgtcaaacccgaactggtgccggaagatttagcttttctgcaatacaccggcggcaccactggtgtggcgaaaggcgcgatgctgactcaccgcaatatgctggcgaacctggaacaggttaacgcgacctatggtccgctgttgcatccgggcaaagagctggtggtgacggcgctgccgctgtatcacatttttgccctgaccattaactgcctgctgtttatcgaactgggtgggcagaacctgcttatcactaacccgcgcgatattccagggttggtaaaagagttagcgaaatatccgtttaccgctatcacgggcgttaacaccttgttcaatgcgttgctgaacaataaagagttccagcagctggatttctccagtctgcatctttccgcaggcggtgggatgccagtgcagcaagtggtggcagagcgttgggtgaaactgaccggacagtatctgctggaaggctatggccttaccgagtgtgcgccgctggtcagcgttaacccatatgatattgattatcatagtggtagcatcggtttgccggtgccgtcgacggaagccaaactggtggatgatgatgataatgaagtaccaccaggtcaaccgggtgagctttgtgtcaaaggaccgcaggtgatgctgggttactggcagcgtcccgatgctaccgatgaaatcatcaaaaatggctggttacacaccggcgacatcgcggtaatggatgaagaaggattcctgcgcattgtcgatcgtaaaaaagacatgattctggtttccggttttaacgtctatcccaacgagattgaagatgtcgtcatgcagcatcctggcgtacaggaagtcgcggctgttggcgtaccttccggctccagtggtgaagcggtgaaaatcttcgtagtgaaaaaagatccatcgcttaccgaagagtcactggtgactttttgccgccgtcagctcacgggatacaaagtaccgaagctggtggagtttcgtgatgagttaccgaaatctaacgtcggaaaaattttgcgacgagaattacgtgacgaagcgcgcggcaaagtggacaataaagcctgagctgaaggagttacagtatgaatgcaaaactcaaaaaactttttcagcaaaaagtcgacggtaaaacaatcattgtcacaggagcatcaagtggtattggtttaacggtttcaaaataccttgctcaagcaggtgctcatgtcttattgctcgctcgtactaaagagaagttagatgaggtcaaagcagagatcgaggctgaaggtggaaaagcgaccgtatttccatgtgatctcaatgatatggaatctattgatgccgtttcaaaagaaatcttagcagcagtagatcacattgatattcttgtaaataacgcaggacgttcaatccgtcgtgcggtacatgagtcagttgatcgtttccatgacttcgaacgtaccatgcagttaaattactttggtgcagtacgtttagtcttgaatgttttaccgcacatgatgcagcgtaaagacggtcaaatcattaacatcagctcaattggtgttcttgccaacgcaactcgcttttctgcttacgttgcgtctaaagctgcattggatgcatttagtcgttgtttatctgcggaagttcactcacacaaaattgcgattacctctatttatatgcctttggtccgcacaccaatgattgcaccaaccaaaatttataaatatgtaccaacgctttcacctgaagaagcagccgatttaattgcttatgcaatcgtgaagcgtccgaaaaagatcgcgacgaacttaggtcgccttgcttcgattacttatgcgattgcaccagacattaacaacattttaatgtcgattggtttcaacttattcccaagttctaccgcgtctgttggtgagcaagagaagttgaatttaattcaacgtgcctatgcacgtttgttcccaggcgaacactggtaataagtctggtaaagaaaccgctgctgcgaaatttgaacgccagcacatggactcgtctactagcgcagcttaattaacctaggctgctgccaccgctgagcaataactagcataaccccttggggcctctaaacgggtcttgaggggttttttgctgaaacctcaggcatttgagaagcacacggtcacactgcttccggtagtcaataaaccggtaaaccagcaatagacataagcggctatttaacgaccctgccctgaaccgacgaccgggtcatcgtggccggatcttgcggcccctcggcttgaacgaattgttagacattatttgccgactaccttggtgatctcgcctttcacgtagtggacaaattcttccaactgatctgcgcgcgaggccaagcgatcttcttcttgtccaagataagcctgtctagcttcaagtatgacgggctgatactgggccggcaggcgctccattgcccagtcggcagcgacatccttcggcgcgattttgccggttactgcgctgtaccaaatgcgggacaacgtaagcactacatttcgctcatcgccagcccagtcgggcggcgagttccatagcgttaaggtttcatttagcgcctcaaatagatcctgttcaggaaccggatcaaagagttcctccgccgctggacctaccaaggcaacgctatgttctcttgcttttgtcagcaagatagccagatcaatgtcgatcgtggctggctcgaagatacctgcaagaatgtcattgcgctgccattctccaaattgcagttcgcgcttagctggataacgccacggaatgatgtcgtcgtgcacaacaatggtgacttctacagcgcggagaatctcgctctctccaggggaagccgaagtttccaaaaggtcgttgatcaaagctcgccgcgttgtttcatcaagccttacggtcaccgtaaccagcaaatcaatatcactgtgtggcttcaggccgccatccactgcggagccgtacaaatgtacggccagcaacgtcggttcgagatggcgctcgatgacgccaactacctctgatagttgagtcgatacttcggcgatcaccgcttccctcatactcttcctttttcaatattattgaagcatttatcagggttattgtctcatgagcggatacatatttgaatgtatttagaaaaataaacaaatagctagctcactcggtcgctacgctccgggcgtgagactgcggcgggcgctgcggacacatacaaagttacccacagattccgtggataagcaggggactaacatgtgaggcaaaacagcagggccgcgccggtggcgtttttccataggctccgccctcctgccagagttcacataaacagacgcttttccggtgcatctgtgggagccgtgaggctcaaccatgaatctgacagtacgggcgaaacccgacaggacttaaagatccccaccgtttccggcgggtcgctccctcttgcgctctcctgttccgaccctgccgtttaccggatacctgttccgcctttctcccttacgggaagtgtggcgctttctcatagctcacacactggtatctcggctcggtgtaggtcgttcgctccaagctgggctgtaagcaagaactccccgttcagcccgactgctgcgccttatccggtaactgttcacttgagtccaacccggaaaagcacggtaaaacgccactggcagcagccattggtaactgggagttcgcagaggatttgtttagctaaacacgcggttgctcttgaagtgtgcgccaaagtccggctacactggaaggacagatttggttgctgtgctctgcgaaagccagttaccacggttaagcagttccccaactgacttaaccttcgatcaaaccacctccccaggtggttttttcgtttacagggcaaaagattacgcgcagaaaaaaaggatctcaagaagatcctttgatcttttctactgaaccgctctagatttcagtgcaatttatctcttcaaatgtagcacctgaagtcagccccatacgatataagttgtaattctcatgttagtcatgccccgcgcccaccggaaggagctgactgggttgaaggctctcaagggcatcggtcgagatcccggtgcctaatgagtgagctaacttacattaattgcgttgcgctcactgcccgctttccagtcgggaaacctgtcgtgccagctgcattaatgaatcggccaacgcgcggggagaggcggtttgcgtattgggcgccagggtggtttttcttttcaccagtgagacgggcaacagctgattgcccttcaccgcctggccctgagagagttgcagcaagcggtccacgctggtttgccccagcaggcgaaaatcctgtttgatggtggttaacggcgggatataacatgagctgtcttcggtatcgtcgtatcccactaccgagatgtccgcaccaacgcgcagcccggactcggtaatggcgcgcattgcgcccagcgccatctgatcgttggcaaccagcatcgcagtgggaacgatgccctcattcagcatttgcatggtttgttgaaaaccggacatggcactccagtcgccttcccgttccgctatcggctgaatttgattgcgagtgagatatttatgccagccagccagacgcagacgcgccgagacagaacttaatgggcccgctaacagcgcgatttgctggtgacccaatgcgaccagatgctccacgcccagtcgcgtaccgtcttcatgggagaaaataatactgttgatgggtgtctggtcagagacatcaagaaataacgccggaacattagtgcaggcagcttccacagcaatggcatcctggtcatccagcggatagttaatgatcagcccactgacgcgttgcgcgagaagattgtgcaccgccgctttacaggcttcgacgccgcttcgttctaccatcgacaccaccacgctggcacccagttgatcggcgcgagatttaatcgccgcgacaatttgcgacggcgcgtgcagggccagactggaggtggcaacgccaatcagcaacgactgtttgcccgccagttgttgtgccacgcggttgggaatgtaattcagctccgccatcgccgcttccactttttcccgcgttttcgcagaaacgtggctggcctggttcaccacgcgggaaacggtctgataagagacaccggcatactctgcgacatcgtataacgttactggtttcacattcaccaccctgaattgactctcttccgggcgctatcatgccataccgcgaaaggttttgcgccattcgatggtgtccgggatctcgacgctctcccttatgcgactcctgcattaggaaattaatacgactcactata

SEQ ID NO: 105 - DNA, 8337 bp, Artificial Sequence
  vector
ggggaattgtgagcggataacaattcccctgtagaaataattttgtttaactttaataaggagatataccatgggcagcagccatcaccatcatcaccacagccaggatccttcaatattattgaagcatttatcagggttattgtctcatgagcggatacatatttgaatgtatttagaaaaataaacaaataggggtcagtgttacaaccaattaaccaattctgaacattatcgcgagcccatttatacctgaatatggctcataacaccccttgtttgcctggcggcagtagcgcggtggtcccacctgaccccatgccgaactcagaagtgaaacgccgtagcgccgatggtagtgtggggactccccatgcgagagtagggaactgccaggcatcaaataaaacgaaaggctcagtcgaaagactgggcctttcgcccgggctaattatggggtgtcgcccttattcgactctatagtgaagttcctattctctagaaagtataggaacttctgaagtggggatccggccggcctgcagccccgcagggcctgtctcggtcgatcattcagcccggctcatagatatgcgggcagtgagcgcaacgcaattaatgtaagttagctcactcattaggcaccccaggcttgacactttatgcttccggctcgtataatgtgtggaattgtgagcggataacaataacaatttcacacaggatctaggaaccaaggagagtggcatgtgagtttttctaattataaagtaatcgcgatgccggtgttggttgctaattttgttttgggggcggccactgcatgggcgaatgaaaattatccggcgaaatctgctggctataatcagggtgactgggtcgctagcttcaatttttctaaggtctatgtgggtgaggagcttggcgatctaaatgttggagggggggctttgccaaatgctgatgtaagtattggtaatgatacaacacttacgtttgatatcgcctattttgttagctcaaatatagcggtggatttttttgttggggtgccagctagggctaaatttcaaggtgagaaatcaatctcctcgctgggaagagtcagtgaagttgattacggccctgcaattctttcgcttcaatatcattacgatagctttgagcgactttatccatatgttggggttggtgttggtcgggtgctattttttgataaaaccgacggtgctttgagttcgtttgatattaaggataaatgggcgcctgcttttcaggttggccttagatatgaccttggtaactcatggatgctaaattcagatgtgcgttatattcctttcaaaacggacgtcacaggtactcttggcccggttcctgtttctactaaaattgaggttgatcctttcattctcagtcttggtgcgtcatatgttttctaaggtacccgataacaattacgagcttcatgcacagtgatcgacgctgttgacaattaatcatcggctcgtataatgtgtggatgtggaattgtgagcgctcacaattccacaacggtttccctctagaaataattttgtttaacaggaggtaaaacatatgttaacggcatgtatatcatttggggttgcgatgacgacgaacacgcattttagaggtgaagaattgaagaaggtttggcttaaccgttatcccgcggacgttccgacggagatcaaccctgaccgttatcaatctctggtagatatgtttgagcagtcggtcgcgcgctacgccgatcaacctgcgtttgtgaatatgggggaggtaatgaccttccgcaagctggaagaacgcagtcgcgcgtttgccgcttatttgcaacaagggttggggctgaagaaaggcgatcgcgttgcgttgatgatgcctaatttattgcaatatccggtggcgctgtttggcattttgcgtgccgggatgatcgtcgtaaacgttaacccgttgtataccccgcgtgagcttgagcatcagcttaacgatagcggcgcatcggcgattgttatcgtgtctaactttgctcacacactggaaaaagtggttgataaaaccgccgttcagcacgtaattctgacccgtatgggcgatcagctatctacggcaaaaggcacggtagtcaatttcgttgttaaatacatcaagcgtttggtgccgaaataccatctgccagatgccatttcatttcgtagcgcactgcataacggctaccggatgcagtacgtcaaacccgaactggtgccggaagatttagcttttctgcaatacaccggcggcaccactggtgtggcgaaaggcgcgatgctgactcaccgcaatatgctggcgaacctggaacaggttaacgcgacctatggtccgctgttgcatccgggcaaagagctggtggtgacggcgctgccgctgtatcacatttttgccctgaccattaactgcctgctgtttatcgaactgggtgggcagaacctgcttatcactaacccgcgcgatattccagggttggtaaaagagttagcgaaatatccgtttaccgctatcacgggcgttaacaccttgttcaatgcgttgctgaacaataaagagttccagcagctggatttctccagtctgcatctttccgcaggcggtgggatgccagtgcagcaagtggtggcagagcgttgggtgaaactgaccggacagtatctgctggaaggctatggccttaccgagtgtgcgccgctggtcagcgttaacccatatgatattgattatcatagtggtagcatcggtttgccggtgccgtcgacggaagccaaactggtggatgatgatgataatgaagtaccaccaggtcaaccgggtgagctttgtgtcaaaggaccgcaggtgatgctgggttactggcagcgtcccgatgctaccgatgaaatcatcaaaaatggctggttacacaccggcgacatcgcggtaatggatgaagaaggattcctgcgcattgtcgatcgtaaaaaagacatgattctggtttccggttttaacgtctatcccaacgagattgaagatgtcgtcatgcagcatcctggcgtacaggaagtcgcggctgttggcgtaccttccggctccagtggtgaagcggtgaaaatcttcgtagtgaaaaaagatccatcgcttaccgaagagtcactggtgactttttgccgccgtcagctcacgggatacaaagtaccgaagctggtggagtttcgtgatgagttaccgaaatctaacgtcggaaaaattttgcgacgagaattacgtgacgaagcgcgcggcaaagtggacaataaagcctgagcgagaaggagttctatcatggcaattcagcaggtacatcacgcggacacgagcagcagcaaagtattgggtcaactgcgtggcaagcgtgtcctgattacgggcaccacgggtttcctgggtaaggtcgtgctggagcgcttgattcgcgctgtgccggacattggtgcgatctatttgttgatccgtggtaataagcgtcacccggatgcacgttctcgctttttggaagagatcgcgaccagctcggtgttcgatcgcctgcgtgaagcagactccgagggttttgacgcattcctggaagagcgcattcactgtgtgactggcgaggtcacggaagcaggttttggcatcggccaagaggactaccgcaaactggcgaccgaattggacgcggtgattaacagcgcagcgagcgtgaactttcgtgaagaactggacaaggcgctggcgatcaacactctgtgcctgcgcaatatcgcgggtatggtggatctgaatccaaaactggcggtcctgcaagttagcacttgctatgtgaacggtatgaacagcggtcaagttaccgaaagcgtgatcaagccggcaggtgaagcggttccgcgtagcccggatggtttttacgagattgaagagctggtgcgcctgctgcaggacaaaatcgaggacgttcaggctcgttatagcggcaaggtcctggagcgtaagctggttgatctgggcattcgtgaagcgaatcgttatggctggagcgacacgtacacgtttaccaagtggctgggtgagcagctgttgatgaaagcgctgaatggtcgcaccttgaccatcctgcgtccgagcattattgagtctgccctggaagaacctgcgcctggctggatcgagggtgtgaaggttgcagacgcaatcattctggcctatgcgcgtgagaaggttaccctgttcccgggtaagcgtagcggtattatcgatgtcatcccggttgacctggtcgccaacagcattattctgagcctggcggaagcgctgggcgagccaggccgtcgccgcatctatcaatgctgttctggtggtggtaacccgatcagcctgggtgagttcatcgaccatctgatggccgagagcaaagcaaattacgccgcatacgatcacctgttctaccgtcagccgtccaaaccgtttttggcggtcaatcgcgcgctgttcgatctggttattagcggtgttcgtctgccgctgagcctgacggatcgcgttctgaagctgttgggtaactcccgtgatctgaaaatgctgcgcaatctggacaccacccaatccctggccaccattttcggcttctataccgctccggactacatcttccgtaatgatgaactgatggccctggccaaccgtatgggcgaggtcgataaaggcctgtttccggttgatgcgcgtctgattgactgggagctgtacctgcgtaaaatccatctggctggcctgaaccgttacgcattgaaagaacgtaaagtctactcgctgaaaaccgctcgtcagcgcaaaaaggccgcgtaatgagtctggtaaagaaaccgctgctgcgaaatttgaacgccagcacatggactcgtctactagcgcagcttaattaacctaggctgctgccaccgctgagcaataactagcataaccccttggggcctctaaacgggtcttgaggggttttttgctgaaacctcaggcatttgagaagcacacggtcacactgcttccggtagtcaataaaccggtaaaccagcaatagacataagcggctatttaacgaccctgccctgaaccgacgaccgggtcatcgtggccggatcttgcggcccctcggcttgaacgaattgttagacattatttgccgactaccttggtgatctcgcctttcacgtagtggacaaattcttccaactgatctgcgcgcgaggccaagcgatcttcttcttgtccaagataagcctgtctagcttcaagtatgacgggctgatactgggccggcaggcgctccattgcccagtcggcagcgacatccttcggcgcgattttgccggttactgcgctgtaccaaatgcgggacaacgtaagcactacatttcgctcatcgccagcccagtcgggcggcgagttccatagcgttaaggtttcatttagcgcctcaaatagatcctgttcaggaaccggatcaaagagttcctccgccgctggacctaccaaggcaacgctatgttctcttgcttttgtcagcaagatagccagatcaatgtcgatcgtggctggctcgaagatacctgcaagaatgtcattgcgctgccattctccaaattgcagttcgcgcttagctggataacgccacggaatgatgtcgtcgtgcacaacaatggtgacttctacagcgcggagaatctcgctctctccaggggaagccgaagtttccaaaaggtcgttgatcaaagctcgccgcgttgtttcatcaagccttacggtcaccgtaaccagcaaatcaatatcactgtgtggcttcaggccgccatccactgcggagccgtacaaatgtacggccagcaacgtcggttcgagatggcgctcgatgacgccaactacctctgatagttgagtcgatacttcggcgatcaccgcttccctcatactcttcctttttcaatattattgaagcatttatcagggttattgtctcatgagcggatacatatttgaatgtatttagaaaaataaacaaatagctagctcactcggtcgctacgctccgggcgtgagactgcggcgggcgctgcggacacatacaaagttacccacagattccgtggataagcaggggactaacatgtgaggcaaaacagcagggccgcgccggtggcgtttttccataggctccgccctcctgccagagttcacataaacagacgcttttccggtgcatctgtgggagccgtgaggctcaaccatgaatctgacagtacgggcgaaacccgacaggacttaaagatccccaccgtttccggcgggtcgctccctcttgcgctctcctgttccgaccctgccgtttaccggatacctgttccgcctttctcccttacgggaagtgtggcgctttctcatagctcacacactggtatctcggctcggtgtaggtcgttcgctccaagctgggctgtaagcaagaactccccgttcagcccgactgctgcgccttatccggtaactgttcacttgagtccaacccggaaaagcacggtaaaacgccactggcagcagccattggtaactgggagttcgcagaggatttgtttagctaaacacgcggttgctcttgaagtgtgcgccaaagtccggctacactggaaggacagatttggttgctgtgctctgcgaaagccagttaccacggttaagcagttccccaactgacttaaccttcgatcaaaccacctccccaggtggttttttcgtttacagggcaaaagattacgcgcagaaaaaaaggatctcaagaagatcctttgatcttttctactgaaccgctctagatttcagtgcaatttatctcttcaaatgtagcacctgaagtcagccccatacgatataagttgtaattctcatgttagtcatgccccgcgcccaccggaaggagctgactgggttgaaggctctcaagggcatcggtcgagatcccggtgcctaatgagtgagctaacttacattaattgcgttgcgctcactgcccgctttccagtcgggaaacctgtcgtgccagctgcattaatgaatcggccaacgcgcggggagaggcggtttgcgtattgggcgccagggtggtttttcttttcaccagtgagacgggcaacagctgattgcccttcaccgcctggccctgagagagttgcagcaagcggtccacgctggtttgccccagcaggcgaaaatcctgtttgatggtggttaacggcgggatataacatgagctgtcttcggtatcgtcgtatcccactaccgagatgtccgcaccaacgcgcagcccggactcggtaatggcgcgcattgcgcccagcgccatctgatcgttggcaaccagcatcgcagtgggaacgatgccctcattcagcatttgcatggtttgttgaaaaccggacatggcactccagtcgccttcccgttccgctatcggctgaatttgattgcgagtgagatatttatgccagccagccagacgcagacgcgccgagacagaacttaatgggcccgctaacagcgcgatttgctggtgacccaatgcgaccagatgctccacgcccagtcgcgtaccgtcttcatgggagaaaataatactgttgatgggtgtctggtcagagacatcaagaaataacgccggaacattagtgcaggcagcttccacagcaatggcatcctggtcatccagcggatagttaatgatcagcccactgacgcgttgcgcgagaagattgtgcaccgccgctttacaggcttcgacgccgcttcgttctaccatcgacaccaccacgctggcacccagttgatcggcgcgagatttaatcgccgcgacaatttgcgacggcgcgtgcagggccagactggaggtggcaacgccaatcagcaacgactgtttgcccgccagttgttgtgccacgcggttgggaatgtaattcagctccgccatcgccgcttccactttttcccgcgttttcgcagaaacgtggctggcctggttcaccacgcgggaaacggtctgataagagacaccggcatactctgcgacatcgtataacgttactggtttcacattcaccaccctgaattgactctcttccgggcgctatcatgccataccgcgaaaggttttgcgccattcgatggtgtccgggatctcgacgctctcccttatgcgactcctgcattaggaaattaatacgactcactata

SEQ ID NO: 106 - DNA, 8615 bp, Artificial Sequence
  vector
ggggaattgtgagcggataacaattcccctgtagaaataattttgtttaactttaataaggagatataccatgggcagcagccatcaccatcatcaccacagccaggatccttcaatattattgaagcatttatcagggttattgtctcatgagcggatacatatttgaatgtatttagaaaaataaacaaataggggtcagtgttacaaccaattaaccaattctgaacattatcgcgagcccatttatacctgaatatggctcataacaccccttgtttgcctggcggcagtagcgcggtggtcccacctgaccccatgccgaactcagaagtgaaacgccgtagcgccgatggtagtgtggggactccccatgcgagagtagggaactgccaggcatcaaataaaacgaaaggctcagtcgaaagactgggcctttcgcccgggctaattatggggtgtcgcccttattcgactctatagtgaagttcctattctctagaaagtataggaacttctgaagtggggatccggccggcctgcagccccgcagggcctgtctcggtcgatcattcagcccggctcatagatatgcgggcagtgagcgcaacgcaattaatgtaagttagctcactcattaggcaccccaggcttgacactttatgcttccggctcgtataatgtgtggaattgtgagcggataacaataacaatttcacacaggatctaggaaccaaggagagtggcatgtgagtttttctaattataaagtaatcgcgatgccggtgttggttgctaattttgttttgggggcggccactgcatgggcgaatgaaaattatccggcgaaatctgctggctataatcagggtgactgggtcgctagcttcaatttttctaaggtctatgtgggtgaggagcttggcgatctaaatgttggagggggggctttgccaaatgctgatgtaagtattggtaatgatacaacacttacgtttgatatcgcctattttgttagctcaaatatagcggtggatttttttgttggggtgccagctagggctaaatttcaaggtgagaaatcaatctcctcgctgggaagagtcagtgaagttgattacggccctgcaattctttcgcttcaatatcattacgatagctttgagcgactttatccatatgttggggttggtgttggtcgggtgctattttttgataaaaccgacggtgctttgagttcgtttgatattaaggataaatgggcgcctgcttttcaggttggccttagatatgaccttggtaactcatggatgctaaattcagatgtgcgttatattcctttcaaaacggacgtcacaggtactcttggcccggttcctgtttctactaaaattgaggttgatcctttcattctcagtcttggtgcgtcatatgttttctaaggtacccgataacaattacgagcttcatgcacagtgatcgacgctgttgacaattaatcatcggctcgtataatgtgtggatgtggaattgtgagcgctcacaattccacaacggtttccctctagaaataattttgtttaacaggaggtaaaactaggaggtaaaaaaaatgacgaaaaagattagcttcatcatcaatggccaagtagagatttttccggaaagcgatgatctggtccaaagcatcaatttcggtgacaacagcgtttatctgccgatcctgaacgactcccacgtcaaaaacattatcgactgtaatggcaataatgaattgcgtctgcacaacatcgtcaacttcctgtataccgtgggtcaacgttggaaaaacgaagaatattcgcgtcgccgtacctatatccgcgacctgaaaaagtacatgggttacagcgaagaaatggcgaaactggaagccaactggattagcatgattttgtgcagcaagggtggtctgtacgacgtggtggaaaatgagctgggcagccgtcacatcatggatgagtggctgccgcaggacgagagctacgtgcgtgccttcccgaaaggcaaaagcgtgcacctgttggcaggtaacgtcccgttgtctggcattatgtccatcttgcgtgctattctgaccaaaaaccaatgcattatcaaaacgagcagcaccgacccttttacggccaatgcactggcattgtcgtttatcgacgtggacccgaatcacccgattactcgcagcctgtcggtgatttactggccgcatcagggcgacacctctctggcaaaagagattatgcgccacgcagacgttatcgtcgcttggggtggtccagatgctattaactgggcggtggagcacgctccgtcttacgccgatgtgatcaaattcggtagcaagaagtctctgtgtattatcgacaatccggttgacctgacctctgctgcaacgggtgccgctcatgatgtgtgcttctacgatcagcgtgcctgcttttccgcgcaaaacatctactatatgggcaatcattacgaagagttcaaattggctctgattgaaaagctgaatctgtatgcacatatcctgccgaacgcgaagaaagattttgatgagaaagcggcctacagcctggttcaaaaagaatcgctgttcgctggtctgaaagttgaagtagacattcaccagcgttggatgatcattgagagcaatgctggtgtggagtttaatcagccgctgggccgttgcgtgtatctgcaccatgttgataacattgagcagattctgccgtatgttcagaaaaacaaaacgcagaccatcagcatctttccgtgggaaagcagcttcaagtatcgtgatgccttggcgctgaaaggcgccgagcgcattgtcgaagcgggtatgaacaacattttccgcgtgggtggcagccatgacggtatgcgtccgctgcaacgtctggttacgtacatcagccacgaacgcccaagcaactataccgccaaggacgttgcggttgagatcgaacaaacccgctttttggaagaagataagtttctggtctttgttccataaaggaggtaaaaaaaatggagaacgaaagcaaatacaaaactattgaccatgtgatctgtgttgagggtaataagaagattcatgtctgggaaacgctgccggaagagaatagcccgaagcgcaaaaacgcgattatcatcgcgtccggttttgctcgccgtatggaccactttgcgggtttggctgagtacttgtcccgtaatggctttcacgttatccgttacgatagcctgcatcacgtgggtctgagcagcggtacgattgatgaatttaccatgtctattggcaaacagtcgctgctggcggtcgtggattggttgaccacgcgcaagatcaacaattttggtatgctggcgagcagcctgagcgcacgtattgcctatgcgagcttgagcgagatcaacgcctcgttcctgatcaccgcagtgggtgttgttaacttgcgttatagcctggaacgtgcactgggcttcgattatctgagcttgccaatcaatgagctgccagataatctggattttgagggtcataagctgggtgccgaggtgtttgcacgcgactgcctggactttggttgggaggatctggcaagcaccatcaataacatgatgtacctggacatcccattcattgcgttcacggccaacaatgataactgggtcaagcaggacgaagttattacgctgttgagcaatattcgtagcaatcgctgcaagatttactccctgctgggttcttctcacgacctgtcggagaacttggtggttctgcgtaatttctatcaatctgtgaccaaagcggcgattgcgatggacaatgatcacctggatattgacgttgacatcacggaaccgtccttcgagcacctgacgattgcgaccgtgaacgaacgtcgtatgcgtatcgagatcgaaaatcaggcgattagcctgagctaaaggaggtaaaaaaaatgaagggtatcaaagaatacgacagcagcgccgcaattctgagcaacatcattctgcgtagcaagacgggtatgaccagctacgtggacaagcaggaaatcaccgcttctagcgaaatcgacgatttgattttcagcagcgatcctctggtttggagctacgatgagcaagagaagatccgtaaaaagttggtcctggatgctttccgtaaccattacaagcactgtcgtgagtaccgtcactactgccaggcgcacaaggttgatgacaatatcactgaaattgacgacatcccggtctttcctacgtcggtgttcaagttcacgcgcctgctgacctctcaggaaaacgagatcgagagctggttcaccagctcgggtacgaacggtctgaaaagccaggttgcacgtgaccgcctgtccattgaacgtctgctgggctcggtgagctatggtatgaaatatgtcggtagctggtttgaccatcaaatcgagctggtaaacttgggtccggatcgtttcaatgcacataacatctggttcaagtacgtaatgagcctggtggaactgctgtacccgacgactttcaccgtcaccgaagagcgcatcgactttgtgaaaaccctgaactctctggaacgcatcaagaatcaaggtaaggacttgtgcctgattggcagcccgtacttcatttacctgctgtgtcactacatgaaagacaagaagatcagcttcagcggtgacaagagcttgtatatcatcacgggcggtggctggaaaagctacgagaaagaaagcctgaagcgtgacgactttaaccatctgctgtttgataccttcaatctgagcgacattagccagattcgtgacatctttaatcaagtcgagctgaacacttgtttcttcgaggatgaaatgcagcgtaaacacgtcccgccgtgggtgtatgcacgtgccctggacccggaaaccttgaagccggtcccggacggcaccccgggtttgatgtcctacatggacgccagcgcgaccagctatccggcgttcatcgttaccgatgacgtgggcatcatctcgcgcgaatacggcaaatacccgggtgttttggtcgagattctgcgtcgcgtgaacacccgtacccaaaagggttgcgcgttgagcctgaccgaggcgttcgatagctaagtctggtaaagaaaccgctgctgcgaaatttgaacgccagcacatggactcgtctactagcgcagcttaattaacctaggctgctgccaccgctgagcaataactagcataaccccttggggcctctaaacgggtcttgaggggttttttgctgaaacctcaggcatttgagaagcacacggtcacactgcttccggtagtcaataaaccggtaaaccagcaatagacataagcggctatttaacgaccctgccctgaaccgacgaccgggtcatcgtggccggatcttgcggcccctcggcttgaacgaattgttagacattatttgccgactaccttggtgatctcgcctttcacgtagtggacaaattcttccaactgatctgcgcgcgaggccaagcgatcttcttcttgtccaagataagcctgtctagcttcaagtatgacgggctgatactgggccggcaggcgctccattgcccagtcggcagcgacatccttcggcgcgattttgccggttactgcgctgtaccaaatgcgggacaacgtaagcactacatttcgctcatcgccagcccagtcgggcggcgagttccatagcgttaaggtttcatttagcgcctcaaatagatcctgttcaggaaccggatcaaagagttcctccgccgctggacctaccaaggcaacgctatgttctcttgcttttgtcagcaagatagccagatcaatgtcgatcgtggctggctcgaagatacctgcaagaatgtcattgcgctgccattctccaaattgcagttcgcgcttagctggataacgccacggaatgatgtcgtcgtgcacaacaatggtgacttctacagcgcggagaatctcgctctctccaggggaagccgaagtttccaaaaggtcgttgatcaaagctcgccgcgttgtttcatcaagccttacggtcaccgtaaccagcaaatcaatatcactgtgtggcttcaggccgccatccactgcggagccgtacaaatgtacggccagcaacgtcggttcgagatggcgctcgatgacgccaactacctctgatagttgagtcgatacttcggcgatcaccgcttccctcatactcttcctttttcaatattattgaagcatttatcagggttattgtctcatgagcggatacatatttgaatgtatttagaaaaataaacaaatagctagctcactcggtcgctacgctccgggcgtgagactgcggcgggcgctgcggacacatacaaagttacccacagattccgtggataagcaggggactaacatgtgaggcaaaacagcagggccgcgccggtggcgtttttccataggctccgccctcctgccagagttcacataaacagacgcttttccggtgcatctgtgggagccgtgaggctcaaccatgaatctgacagtacgggcgaaacccgacaggacttaaagatccccaccgtttccggcgggtcgctccctcttgcgctctcctgttccgaccctgccgtttaccggatacctgttccgcctttctcccttacgggaagtgtggcgctttctcatagctcacacactggtatctcggctcggtgtaggtcgttcgctccaagctgggctgtaagcaagaactccccgttcagcccgactgctgcgccttatccggtaactgttcacttgagtccaacccggaaaagcacggtaaaacgccactggcagcagccattggtaactgggagttcgcagaggatttgtttagctaaacacgcggttgctcttgaagtgtgcgccaaagtccggctacactggaaggacagatttggttgctgtgctctgcgaaagccagttaccacggttaagcagttccccaactgacttaaccttcgatcaaaccacctccccaggtggttttttcgtttacagggcaaaagattacgcgcagaaaaaaaggatctcaagaagatcctttgatcttttctactgaaccgctctagatttcagtgcaatttatctcttcaaatgtagcacctgaagtcagccccatacgatataagttgtaattctcatgttagtcatgccccgcgcccaccggaaggagctgactgggttgaaggctctcaagggcatcggtcgagatcccggtgcctaatgagtgagctaacttacattaattgcgttgcgctcactgcccgctttccagtcgggaaacctgtcgtgccagctgcattaatgaatcggccaacgcgcggggagaggcggtttgcgtattgggcgccagggtggtttttcttttcaccagtgagacgggcaacagctgattgcccttcaccgcctggccctgagagagttgcagcaagcggtccacgctggtttgccccagcaggcgaaaatcctgtttgatggtggttaacggcgggatataacatgagctgtcttcggtatcgtcgtatcccactaccgagatgtccgcaccaacgcgcagcccggactcggtaatggcgcgcattgcgcccagcgccatctgatcgttggcaaccagcatcgcagtgggaacgatgccctcattcagcatttgcatggtttgttgaaaaccggacatggcactccagtcgccttcccgttccgctatcggctgaatttgattgcgagtgagatatttatgccagccagccagacgcagacgcgccgagacagaacttaatgggcccgctaacagcgcgatttgctggtgacccaatgcgaccagatgctccacgcccagtcgcgtaccgtcttcatgggagaaaataatactgttgatgggtgtctggtcagagacatcaagaaataacgccggaacattagtgcaggcagcttccacagcaatggcatcctggtcatccagcggatagttaatgatcagcccactgacgcgttgcgcgagaagattgtgcaccgccgctttacaggcttcgacgccgcttcgttctaccatcgacaccaccacgctggcacccagttgatcggcgcgagatttaatcgccgcgacaatttgcgacggcgcgtgcagggccagactggaggtggcaacgccaatcagcaacgactgtttgcccgccagttgttgtgccacgcggttgggaatgtaattcagctccgccatcgccgcttccactttttcccgcgttttcgcagaaacgtggctggcctggttcaccacgcgggaaacggtctgataagagacaccggcatactctgcgacatcgtataacgttactggtttcacattcaccaccctgaattgactctcttccgggcgctatcatgccataccgcgaaaggttttgcgccattcgatggtgtccgggatctcgacgctctcccttatgcgactcctgcattaggaaattaatacgactcactata

SEQ ID NO: 107 - DNA, 37 bp, Artificial Sequence
  primer
aataaggagatatacgataacaattacgagcttcatg

SEQ ID NO: 108 - DNA, 35 bp, Artificial Sequence
  primer
gtttctttaccagacgcgttcaaatttcgcagcag

SEQ ID NO: 109 - DNA, 6369 bp, Artificial Sequence
  vector
ggggaattgtgagcggataacaattcccctgtagaaataattttgtttaactttaataaggagatatacgataacaattacgagcttcatgcacagtgatcgacgctgttgacaattaatcatcggctcgtataatgtgtggatgtggaattgtgagcgctcacaattccacaacggtttccctctagaaataattttgtttaacaggaggtaaaacatatgttaacggcatgtatatcatttggggttgcgatgacgacgaacacgcattttagaggtgaagaattgaagaaggtttggcttaaccgttatcccgcggacgttccgacggagatcaaccctgaccgttatcaatctctggtagatatgtttgagcagtcggtcgcgcgctacgccgatcaacctgcgtttgtgaatatgggggaggtaatgaccttccgcaagctggaagaacgcagtcgcgcgtttgccgcttatttgcaacaagggttggggctgaagaaaggcgatcgcgttgcgttgatgatgcctaatttattgcaatatccggtggcgctgtttggcattttgcgtgccgggatgatcgtcgtaaacgttaacccgttgtataccccgcgtgagcttgagcatcagcttaacgatagcggcgcatcggcgattgttatcgtgtctaactttgctcacacactggaaaaagtggttgataaaaccgccgttcagcacgtaattctgacccgtatgggcgatcagctatctacggcaaaaggcacggtagtcaatttcgttgttaaatacatcaagcgtttggtgccgaaataccatctgccagatgccatttcatttcgtagcgcactgcataacggctaccggatgcagtacgtcaaacccgaactggtgccggaagatttagcttttctgcaatacaccggcggcaccactggtgtggcgaaaggcgcgatgctgactcaccgcaatatgctggcgaacctggaacaggttaacgcgacctatggtccgctgttgcatccgggcaaagagctggtggtgacggcgctgccgctgtatcacatttttgccctgaccattaactgcctgctgtttatcgaactgggtgggcagaacctgcttatcactaacccgcgcgatattccagggttggtaaaagagttagcgaaatatccgtttaccgctatcacgggcgttaacaccttgttcaatgcgttgctgaacaataaagagttccagcagctggatttctccagtctgcatctttccgcaggcggtgggatgccagtgcagcaagtggtggcagagcgttgggtgaaactgaccggacagtatctgctggaaggctatggccttaccgagtgtgcgccgctggtcagcgttaacccatatgatattgattatcatagtggtagcatcggtttgccggtgccgtcgacggaagccaaactggtggatgatgatgataatgaagtaccaccaggtcaaccgggtgagctttgtgtcaaaggaccgcaggtgatgctgggttactggcagcgtcccgatgctaccgatgaaatcatcaaaaatggctggttacacaccggcgacatcgcggtaatggatgaagaaggattcctgcgcattgtcgatcgtaaaaaagacatgattctggtttccggttttaacgtctatcccaacgagattgaagatgtcgtcatgcagcatcctggcgtacaggaagtcgcggctgttggcgtaccttccggctccagtggtgaagcggtgaaaatcttcgtagtgaaaaaagatccatcgcttaccgaagagtcactggtgactttttgccgccgtcagctcacgggatacaaagtaccgaagctggtggagtttcgtgatgagttaccgaaatctaacgtcggaaaaattttgcgacgagaattacgtgacgaagcgcgcggcaaagtggacaataaagcctgagccaatcagggaaaaacgcgtgaacaaaaaacttgaagctctcttccgagagaatgtaaaaggtaaagtggctttgatcactggtgcatctagtggaatcggtttgacgattgcaaaaagaattgctgcggcaggtgctcatgtattattggttgcccgaacccaagaaacactggaagaagtgaaagctgcaattgaacagcaagggggacaggcctctatttttccttgtgacctgactgacatgaatgcgattgaccagttatcacaacaaattatggccagtgtcgatcatgtcgatttcctgatcaataatgcagggcgttcgattcgccgtgccgtacacgagtcgtttgatcgcttccatgattttgaacgcaccatgcagctgaattactttggtgcggtacgtttagtgttaaatttactgccacatatgattaagcgtaaaaatggccagatcatcaatatcagctctattggtgtattggccaatgcgacccgtttttctgcttatgtcgcgtctaaagctgcgctggatgccttcagtcgctgtctttcagccgaggtactcaagcataaaatctcaattacctcgatttatatgccattggtgcgtaccccaatgatcgcacccaccaaaatttataaatacgtgcccacgctttccccagaagaagccgcagatctcattgtctacgccattgtgaaacgtccaaaacgtattgcgacgcacttgggtcgtctggcgtcaattacctatgccatcgcaccagacatcaataatattctgatgtcgattggatttaacctattcccaagctcaacggctgcactgggtgaacaggaaaaattgaatctgctacaacgtgcctatgcccgcttgttcccaggcgaacactggtaaaatttataaaagaagcctctcataccgagaggtctggtaaagaaaccgctgctgcgaaatttgaacgcgtctggtaaagaaaccgctgctgcgaaatttgaacgccagcacatggactcgtctactagcgcagcttaattaacctaggctgctgccaccgctgagcaataactagcataaccccttggggcctctaaacgggtcttgaggggttttttgctgaaacctcaggcatttgagaagcacacggtcacactgcttccggtagtcaataaaccggtaaaccagcaatagacataagcggctatttaacgaccctgccctgaaccgacgaccgggtcatcgtggccggatcttgcggcccctcggcttgaacgaattgttagacattatttgccgactaccttggtgatctcgcctttcacgtagtggacaaattcttccaactgatctgcgcgcgaggccaagcgatcttcttcttgtccaagataagcctgtctagcttcaagtatgacgggctgatactgggccggcaggcgctccattgcccagtcggcagcgacatccttcggcgcgattttgccggttactgcgctgtaccaaatgcgggacaacgtaagcactacatttcgctcatcgccagcccagtcgggcggcgagttccatagcgttaaggtttcatttagcgcctcaaatagatcctgttcaggaaccggatcaaagagttcctccgccgctggacctaccaaggcaacgctatgttctcttgcttttgtcagcaagatagccagatcaatgtcgatcgtggctggctcgaagatacctgcaagaatgtcattgcgctgccattctccaaattgcagttcgcgcttagctggataacgccacggaatgatgtcgtcgtgcacaacaatggtgacttctacagcgcggagaatctcgctctctccaggggaagccgaagtttccaaaaggtcgttgatcaaagctcgccgcgttgtttcatcaagccttacggtcaccgtaaccagcaaatcaatatcactgtgtggcttcaggccgccatccactgcggagccgtacaaatgtacggccagcaacgtcggttcgagatggcgctcgatgacgccaactacctctgatagttgagtcgatacttcggcgatcaccgcttccctcatactcttcctttttcaatattattgaagcatttatcagggttattgtctcatgagcggatacatatttgaatgtatttagaaaaataaacaaatagctagctcactcggtcgctacgctccgggcgtgagactgcggcgggcgctgcggacacatacaaagttacccacagattccgtggataagcaggggactaacatgtgaggcaaaacagcagggccgcgccggtggcgtttttccataggctccgccctcctgccagagttcacataaacagacgcttttccggtgcatctgtgggagccgtgaggctcaaccatgaatctgacagtacgggcgaaacccgacaggacttaaagatccccaccgtttccggcgggtcgctccctcttgcgctctcctgttccgaccctgccgtttaccggatacctgttccgcctttctcccttacgggaagtgtggcgctttctcatagctcacacactggtatctcggctcggtgtaggtcgttcgctccaagctgggctgtaagcaagaactccccgttcagcccgactgctgcgccttatccggtaactgttcacttgagtccaacccggaaaagcacggtaaaacgccactggcagcagccattggtaactgggagttcgcagaggatttgtttagctaaacacgcggttgctcttgaagtgtgcgccaaagtccggctacactggaaggacagatttggttgctgtgctctgcgaaagccagttaccacggttaagcagttccccaactgacttaaccttcgatcaaaccacctccccaggtggttttttcgtttacagggcaaaagattacgcgcagaaaaaaaggatctcaagaagatcctttgatcttttctactgaaccgctctagatttcagtgcaatttatctcttcaaatgtagcacctgaagtcagccccatacgatataagttgtaattctcatgttagtcatgccccgcgcccaccggaaggagctgactgggttgaaggctctcaagggcatcggtcgagatcccggtgcctaatgagtgagctaacttacattaattgcgttgcgctcactgcccgctttccagtcgggaaacctgtcgtgccagctgcattaatgaatcggccaacgcgcggggagaggcggtttgcgtattgggcgccagggtggtttttcttttcaccagtgagacgggcaacagctgattgcccttcaccgcctggccctgagagagttgcagcaagcggtccacgctggtttgccccagcaggcgaaaatcctgtttgatggtggttaacggcgggatataacatgagctgtcttcggtatcgtcgtatcccactaccgagatgtccgcaccaacgcgcagcccggactcggtaatggcgcgcattgcgcccagcgccatctgatcgttggcaaccagcatcgcagtgggaacgatgccctcattcagcatttgcatggtttgttgaaaaccggacatggcactccagtcgccttcccgttccgctatcggctgaatttgattgcgagtgagatatttatgccagccagccagacgcagacgcgccgagacagaacttaatgggcccgctaacagcgcgatttgctggtgacccaatgcgaccagatgctccacgcccagtcgcgtaccgtcttcatgggagaaaataatactgttgatgggtgtctggtcagagacatcaagaaataacgccggaacattagtgcaggcagcttccacagcaatggcatcctggtcatccagcggatagttaatgatcagcccactgacgcgttgcgcgagaagattgtgcaccgccgctttacaggcttcgacgccgcttcgttctaccatcgacaccaccacgctggcacccagttgatcggcgcgagatttaatcgccgcgacaatttgcgacggcgcgtgcagggccagactggaggtggcaacgccaatcagcaacgactgtttgcccgccagttgttgtgccacgcggttgggaatgtaattcagctccgccatcgccgcttccactttttcccgcgttttcgcagaaacgtggctggcctggttcaccacgcgggaaacggtctgataagagacaccggcatactctgcgacatcgtataacgttactggtttcacattcaccaccctgaattgactctcttccgggcgctatcatgccataccgcgaaaggttttgcgccattcgatggtgtccgggatctcgacgctctcccttatgcgactcctgcattaggaaattaatacgactcactata

SEQ ID NO: 110 - DNA, 6363 bp, Artificial Sequence
  vector
ggggaattgtgagcggataacaattcccctgtagaaataattttgtttaactttaataaggagatatacgataacaattacgagcttcatgcacagtgatcgacgctgttgacaattaatcatcggctcgtataatgtgtggatgtggaattgtgagcgctcacaattccacaacggtttccctctagaaataattttgtttaacaggaggtaaaacatatgttaacggcatgtatatcatttggggttgcgatgacgacgaacacgcattttagaggtgaagaattgaagaaggtttggcttaaccgttatcccgcggacgttccgacggagatcaaccctgaccgttatcaatctctggtagatatgtttgagcagtcggtcgcgcgctacgccgatcaacctgcgtttgtgaatatgggggaggtaatgaccttccgcaagctggaagaacgcagtcgcgcgtttgccgcttatttgcaacaagggttggggctgaagaaaggcgatcgcgttgcgttgatgatgcctaatttattgcaatatccggtggcgctgtttggcattttgcgtgccgggatgatcgtcgtaaacgttaacccgttgtataccccgcgtgagcttgagcatcagcttaacgatagcggcgcatcggcgattgttatcgtgtctaactttgctcacacactggaaaaagtggttgataaaaccgccgttcagcacgtaattctgacccgtatgggcgatcagctatctacggcaaaaggcacggtagtcaatttcgttgttaaatacatcaagcgtttggtgccgaaataccatctgccagatgccatttcatttcgtagcgcactgcataacggctaccggatgcagtacgtcaaacccgaactggtgccggaagatttagcttttctgcaatacaccggcggcaccactggtgtggcgaaaggcgcgatgctgactcaccgcaatatgctggcgaacctggaacaggttaacgcgacctatggtccgctgttgcatccgggcaaagagctggtggtgacggcgctgccgctgtatcacatttttgccctgaccattaactgcctgctgtttatcgaactgggtgggcagaacctgcttatcactaacccgcgcgatattccagggttggtaaaagagttagcgaaatatccgtttaccgctatcacgggcgttaacaccttgttcaatgcgttgctgaacaataaagagttccagcagctggatttctccagtctgcatctttccgcaggcggtgggatgccagtgcagcaagtggtggcagagcgttgggtgaaactgaccggacagtatctgctggaaggctatggccttaccgagtgtgcgccgctggtcagcgttaacccatatgatattgattatcatagtggtagcatcggtttgccggtgccgtcgacggaagccaaactggtggatgatgatgataatgaagtaccaccaggtcaaccgggtgagctttgtgtcaaaggaccgcaggtgatgctgggttactggcagcgtcccgatgctaccgatgaaatcatcaaaaatggctggttacacaccggcgacatcgcggtaatggatgaagaaggattcctgcgcattgtcgatcgtaaaaaagacatgattctggtttccggttttaacgtctatcccaacgagattgaagatgtcgtcatgcagcatcctggcgtacaggaagtcgcggctgttggcgtaccttccggctccagtggtgaagcggtgaaaatcttcgtagtgaaaaaagatccatcgcttaccgaagagtcactggtgactttttgccgccgtcagctcacgggatacaaagtaccgaagctggtggagtttcgtgatgagttaccgaaatctaacgtcggaaaaattttgcgacgagaattacgtgacgaagcgcgcggcaaagtggacaataaagcctgagctgaaggagttacagtttgatctcgatccgtgaaaaacgtgttaacaagaaattggaggccctgtttcgtgagaatgtcaaaggcaaggttgccctgatcacgggtgctagcagcggcatcggcctgacgattgccaaacgcattgctgcggcaggtgcacatgttctgttggtcgcgcgcacccaggaaaccctggaagaagtgaaggcagcaatcgagcaacagggtggccaggccagcattttcccgtgtgacctgaccgatatgaatgcgattgatcagctgagccaacagattatggcatccgtcgaccacgtagattttctgatcaacaatgccggtcgcagcattcgtcgcgcagtgcacgaaagcttcgaccgttttcatgatttcgagcgtacgatgcaattgaactacttcggtgcggtgcgtctggtcctgaacctgctgccgcacatgatcaaacgtaagaacggtcaaatcatcaatatcagcagcatcggcgtgctggcgaatgcgactcgctttagcgcgtacgttgcgagcaaagcagcgctggatgcgttttctcgttgcctgagcgcagaagttttgaaacataagattagcatcacgagcatttacatgccgttggtgcgtaccccgatgatcgccccgaccaaaatctataagtatgtgccgacgctgagcccggaagaggcagctgacctgattgtctacgctattgttaaacgtccaaagcgtattgcgacccacctgggtcgcttggcgtccatcacctacgcgattgcgccggacattaacaatattctgatgtccattggtttcaacctgttccctagctctaccgcggctctgggcgagcaggagaagctgaatctgctgcaacgtgcctatgcgcgcctgttcccgggtgagcactggtgataagtctggtaaagaaaccgctgctgcgaaatttgaacgcgtctggtaaagaaaccgctgctgcgaaatttgaacgccagcacatggactcgtctactagcgcagcttaattaacctaggctgctgccaccgctgagcaataactagcataaccccttggggcctctaaacgggtcttgaggggttttttgctgaaacctcaggcatttgagaagcacacggtcacactgcttccggtagtcaataaaccggtaaaccagcaatagacataagcggctatttaacgaccctgccctgaaccgacgaccgggtcatcgtggccggatcttgcggcccctcggcttgaacgaattgttagacattatttgccgactaccttggtgatctcgcctttcacgtagtggacaaattcttccaactgatctgcgcgcgaggccaagcgatcttcttcttgtccaagataagcctgtctagcttcaagtatgacgggctgatactgggccggcaggcgctccattgcccagtcggcagcgacatccttcggcgcgattttgccggttactgcgctgtaccaaatgcgggacaacgtaagcactacatttcgctcatcgccagcccagtcgggcggcgagttccatagcgttaaggtttcatttagcgcctcaaatagatcctgttcaggaaccggatcaaagagttcctccgccgctggacctaccaaggcaacgctatgttctcttgcttttgtcagcaagatagccagatcaatgtcgatcgtggctggctcgaagatacctgcaagaatgtcattgcgctgccattctccaaattgcagttcgcgcttagctggataacgccacggaatgatgtcgtcgtgcacaacaatggtgacttctacagcgcggagaatctcgctctctccaggggaagccgaagtttccaaaaggtcgttgatcaaagctcgccgcgttgtttcatcaagccttacggtcaccgtaaccagcaaatcaatatcactgtgtggcttcaggccgccatccactgcggagccgtacaaatgtacggccagcaacgtcggttcgagatggcgctcgatgacgccaactacctctgatagttgagtcgatacttcggcgatcaccgcttccctcatactcttcctttttcaatattattgaagcatttatcagggttattgtctcatgagcggatacatatttgaatgtatttagaaaaataaacaaatagctagctcactcggtcgctacgctccgggcgtgagactgcggcgggcgctgcggacacatacaaagttacccacagattccgtggataagcaggggactaacatgtgaggcaaaacagcagggccgcgccggtggcgtttttccataggctccgccctcctgccagagttcacataaacagacgcttttccggtgcatctgtgggagccgtgaggctcaaccatgaatctgacagtacgggcgaaacccgacaggacttaaagatccccaccgtttccggcgggtcgctccctcttgcgctctcctgttccgaccctgccgtttaccggatacctgttccgcctttctcccttacgggaagtgtggcgctttctcatagctcacacactggtatctcggctcggtgtaggtcgttcgctccaagctgggctgtaagcaagaactccccgttcagcccgactgctgcgccttatccggtaactgttcacttgagtccaacccggaaaagcacggtaaaacgccactggcagcagccattggtaactgggagttcgcagaggatttgtttagctaaacacgcggttgctcttgaagtgtgcgccaaagtccggctacactggaaggacagatttggttgctgtgctctgcgaaagccagttaccacggttaagcagttccccaactgacttaaccttcgatcaaaccacctccccaggtggttttttcgtttacagggcaaaagattacgcgcagaaaaaaaggatctcaagaagatcctttgatcttttctactgaaccgctctagatttcagtgcaatttatctcttcaaatgtagcacctgaagtcagccccatacgatataagttgtaattctcatgttagtcatgccccgcgcccaccggaaggagctgactgggttgaaggctctcaagggcatcggtcgagatcccggtgcctaatgagtgagctaacttacattaattgcgttgcgctcactgcccgctttccagtcgggaaacctgtcgtgccagctgcattaatgaatcggccaacgcgcggggagaggcggtttgcgtattgggcgccagggtggtttttcttttcaccagtgagacgggcaacagctgattgcccttcaccgcctggccctgagagagttgcagcaagcggtccacgctggtttgccccagcaggcgaaaatcctgtttgatggtggttaacggcgggatataacatgagctgtcttcggtatcgtcgtatcccactaccgagatgtccgcaccaacgcgcagcccggactcggtaatggcgcgcattgcgcccagcgccatctgatcgttggcaaccagcatcgcagtgggaacgatgccctcattcagcatttgcatggtttgttgaaaaccggacatggcactccagtcgccttcccgttccgctatcggctgaatttgattgcgagtgagatatttatgccagccagccagacgcagacgcgccgagacagaacttaatgggcccgctaacagcgcgatttgctggtgacccaatgcgaccagatgctccacgcccagtcgcgtaccgtcttcatgggagaaaataatactgttgatgggtgtctggtcagagacatcaagaaataacgccggaacattagtgcaggcagcttccacagcaatggcatcctggtcatccagcggatagttaatgatcagcccactgacgcgttgcgcgagaagattgtgcaccgccgctttacaggcttcgacgccgcttcgttctaccatcgacaccaccacgctggcacccagttgatcggcgcgagatttaatcgccgcgacaatttgcgacggcgcgtgcagggccagactggaggtggcaacgccaatcagcaacgactgtttgcccgccagttgttgtgccacgcggttgggaatgtaattcagctccgccatcgccgcttccactttttcccgcgttttcgcagaaacgtggctggcctggttcaccacgcgggaaacggtctgataagagacaccggcatactctgcgacatcgtataacgttactggtttcacattcaccaccctgaattgactctcttccgggcgctatcatgccataccgcgaaaggttttgcgccattcgatggtgtccgggatctcgacgctctcccttatgcgactcctgcattaggaaattaatacgactcactata

SEQ ID NO: 111 - DNA, 6339 bp, Artificial Sequence
  vector
ggggaattgtgagcggataacaattcccctgtagaaataattttgtttaactttaataaggagatatacgataacaattacgagcttcatgcacagtgatcgacgctgttgacaattaatcatcggctcgtataatgtgtggatgtggaattgtgagcgctcacaattccacaacggtttccctctagaaataattttgtttaacaggaggtaaaacatatgttaacggcatgtatatcatttggggttgcgatgacgacgaacacgcattttagaggtgaagaattgaagaaggtttggcttaaccgttatcccgcggacgttccgacggagatcaaccctgaccgttatcaatctctggtagatatgtttgagcagtcggtcgcgcgctacgccgatcaacctgcgtttgtgaatatgggggaggtaatgaccttccgcaagctggaagaacgcagtcgcgcgtttgccgcttatttgcaacaagggttggggctgaagaaaggcgatcgcgttgcgttgatgatgcctaatttattgcaatatccggtggcgctgtttggcattttgcgtgccgggatgatcgtcgtaaacgttaacccgttgtataccccgcgtgagcttgagcatcagcttaacgatagcggcgcatcggcgattgttatcgtgtctaactttgctcacacactggaaaaagtggttgataaaaccgccgttcagcacgtaattctgacccgtatgggcgatcagctatctacggcaaaaggcacggtagtcaatttcgttgttaaatacatcaagcgtttggtgccgaaataccatctgccagatgccatttcatttcgtagcgcactgcataacggctaccggatgcagtacgtcaaacccgaactggtgccggaagatttagcttttctgcaatacaccggcggcaccactggtgtggcgaaaggcgcgatgctgactcaccgcaatatgctggcgaacctggaacaggttaacgcgacctatggtccgctgttgcatccgggcaaagagctggtggtgacggcgctgccgctgtatcacatttttgccctgaccattaactgcctgctgtttatcgaactgggtgggcagaacctgcttatcactaacccgcgcgatattccagggttggtaaaagagttagcgaaatatccgtttaccgctatcacgggcgttaacaccttgttcaatgcgttgctgaacaataaagagttccagcagctggatttctccagtctgcatctttccgcaggcggtgggatgccagtgcagcaagtggtggcagagcgttgggtgaaactgaccggacagtatctgctggaaggctatggccttaccgagtgtgcgccgctggtcagcgttaacccatatgatattgattatcatagtggtagcatcggtttgccggtgccgtcgacggaagccaaactggtggatgatgatgataatgaagtaccaccaggtcaaccgggtgagctttgtgtcaaaggaccgcaggtgatgctgggttactggcagcgtcccgatgctaccgatgaaatcatcaaaaatggctggttacacaccggcgacatcgcggtaatggatgaagaaggattcctgcgcattgtcgatcgtaaaaaagacatgattctggtttccggttttaacgtctatcccaacgagattgaagatgtcgtcatgcagcatcctggcgtacaggaagtcgcggctgttggcgtaccttccggctccagtggtgaagcggtgaaaatcttcgtagtgaaaaaagatccatcgcttaccgaagagtcactggtgactttttgccgccgtcagctcacgggatacaaagtaccgaagctggtggagtttcgtgatgagttaccgaaatctaacgtcggaaaaattttgcgacgagaattacgtgacgaagcgcgcggcaaagtggacaataaagcctgagctgaaggagttacagtatgaatgcaaaactcaaaaaactttttcagcaaaaagtcgacggtaaaacaatcattgtcacaggagcatcaagtggtattggtttaacggtttcaaaataccttgctcaagcaggtgctcatgtcttattgctcgctcgtactaaagagaagttagatgaggtcaaagcagagatcgaggctgaaggtggaaaagcgaccgtatttccatgtgatctcaatgatatggaatctattgatgccgtttcaaaagaaatcttagcagcagtagatcacattgatattcttgtaaataacgcaggacgttcaatccgtcgtgcggtacatgagtcagttgatcgtttccatgacttcgaacgtaccatgcagttaaattactttggtgcagtacgtttagtcttgaatgttttaccgcacatgatgcagcgtaaagacggtcaaatcattaacatcagctcaattggtgttcttgccaacgcaactcgcttttctgcttacgttgcgtctaaagctgcattggatgcatttagtcgttgtttatctgcggaagttcactcacacaaaattgcgattacctctatttatatgcctttggtccgcacaccaatgattgcaccaaccaaaatttataaatatgtaccaacgctttcacctgaagaagcagccgatttaattgcttatgcaatcgtgaagcgtccgaaaaagatcgcgacgaacttaggtcgccttgcttcgattacttatgcgattgcaccagacattaacaacattttaatgtcgattggtttcaacttattcccaagttctaccgcgtctgttggtgagcaagagaagttgaatttaattcaacgtgcctatgcacgtttgttcccaggcgaacactggtaataagtctggtaaagaaaccgctgctgcgaaatttgaacgcgtctggtaaagaaaccgctgctgcgaaatttgaacgccagcacatggactcgtctactagcgcagcttaattaacctaggctgctgccaccgctgagcaataactagcataaccccttggggcctctaaacgggtcttgaggggttttttgctgaaacctcaggcatttgagaagcacacggtcacactgcttccggtagtcaataaaccggtaaaccagcaatagacataagcggctatttaacgaccctgccctgaaccgacgaccgggtcatcgtggccggatcttgcggcccctcggcttgaacgaattgttagacattatttgccgactaccttggtgatctcgcctttcacgtagtggacaaattcttccaactgatctgcgcgcgaggccaagcgatcttcttcttgtccaagataagcctgtctagcttcaagtatgacgggctgatactgggccggcaggcgctccattgcccagtcggcagcgacatccttcggcgcgattttgccggttactgcgctgtaccaaatgcgggacaacgtaagcactacatttcgctcatcgccagcccagtcgggcggcgagttccatagcgttaaggtttcatttagcgcctcaaatagatcctgttcaggaaccggatcaaagagttcctccgccgctggacctaccaaggcaacgctatgttctcttgcttttgtcagcaagatagccagatcaatgtcgatcgtggctggctcgaagatacctgcaagaatgtcattgcgctgccattctccaaattgcagttcgcgcttagctggataacgccacggaatgatgtcgtcgtgcacaacaatggtgacttctacagcgcggagaatctcgctctctccaggggaagccgaagtttccaaaaggtcgttgatcaaagctcgccgcgttgtttcatcaagccttacggtcaccgtaaccagcaaatcaatatcactgtgtggcttcaggccgccatccactgcggagccgtacaaatgtacggccagcaacgtcggttcgagatggcgctcgatgacgccaactacctctgatagttgagtcgatacttcggcgatcaccgcttccctcatactcttcctttttcaatattattgaagcatttatcagggttattgtctcatgagcggatacatatttgaatgtatttagaaaaataaacaaatagctagctcactcggtcgctacgctccgggcgtgagactgcggcgggcgctgcggacacatacaaagttacccacagattccgtggataagcaggggactaacatgtgaggcaaaacagcagggccgcgccggtggcgtttttccataggctccgccctcctgccagagttcacataaacagacgcttttccggtgcatctgtgggagccgtgaggctcaaccatgaatctgacagtacgggcgaaacccgacaggacttaaagatccccaccgtttccggcgggtcgctccctcttgcgctctcctgttccgaccctgccgtttaccggatacctgttccgcctttctcccttacgggaagtgtggcgctttctcatagctcacacactggtatctcggctcggtgtaggtcgttcgctccaagctgggctgtaagcaagaactccccgttcagcccgactgctgcgccttatccggtaactgttcacttgagtccaacccggaaaagcacggtaaaacgccactggcagcagccattggtaactgggagttcgcagaggatttgtttagctaaacacgcggttgctcttgaagtgtgcgccaaagtccggctacactggaaggacagatttggttgctgtgctctgcgaaagccagttaccacggttaagcagttccccaactgacttaaccttcgatcaaaccacctccccaggtggttttttcgtttacagggcaaaagattacgcgcagaaaaaaaggatctcaagaagatcctttgatcttttctactgaaccgctctagatttcagtgcaatttatctcttcaaatgtagcacctgaagtcagccccatacgatataagttgtaattctcatgttagtcatgccccgcgcccaccggaaggagctgactgggttgaaggctctcaagggcatcggtcgagatcccggtgcctaatgagtgagctaacttacattaattgcgttgcgctcactgcccgctttccagtcgggaaacctgtcgtgccagctgcattaatgaatcggccaacgcgcggggagaggcggtttgcgtattgggcgccagggtggtttttcttttcaccagtgagacgggcaacagctgattgcccttcaccgcctggccctgagagagttgcagcaagcggtccacgctggtttgccccagcaggcgaaaatcctgtttgatggtggttaacggcgggatataacatgagctgtcttcggtatcgtcgtatcccactaccgagatgtccgcaccaacgcgcagcccggactcggtaatggcgcgcattgcgcccagcgccatctgatcgttggcaaccagcatcgcagtgggaacgatgccctcattcagcatttgcatggtttgttgaaaaccggacatggcactccagtcgccttcccgttccgctatcggctgaatttgattgcgagtgagatatttatgccagccagccagacgcagacgcgccgagacagaacttaatgggcccgctaacagcgcgatttgctggtgacccaatgcgaccagatgctccacgcccagtcgcgtaccgtcttcatgggagaaaataatactgttgatgggtgtctggtcagagacatcaagaaataacgccggaacattagtgcaggcagcttccacagcaatggcatcctggtcatccagcggatagttaatgatcagcccactgacgcgttgcgcgagaagattgtgcaccgccgctttacaggcttcgacgccgcttcgttctaccatcgacaccaccacgctggcacccagttgatcggcgcgagatttaatcgccgcgacaatttgcgacggcgcgtgcagggccagactggaggtggcaacgccaatcagcaacgactgtttgcccgccagttgttgtgccacgcggttgggaatgtaattcagctccgccatcgccgcttccactttttcccgcgttttcgcagaaacgtggctggcctggttcaccacgcgggaaacggtctgataagagacaccggcatactctgcgacatcgtataacgttactggtttcacattcaccaccctgaattgactctcttccgggcgctatcatgccataccgcgaaaggttttgcgccattcgatggtgtccgggatctcgacgctctcccttatgcgactcctgcattaggaaattaatacgactcactata

SEQ ID NO: 112 - DNA, 6994 bp, Artificial Sequence
  vector
ggggaattgtgagcggataacaattcccctgtagaaataattttgtttaactttaataaggagatatacgataacaattacgagcttcatgcacagtgatcgacgctgttgacaattaatcatcggctcgtataatgtgtggatgtggaattgtgagcgctcacaattccacaacggtttccctctagaaataattttgtttaacaggaggtaaaacatatgttaacggcatgtatatcatttggggttgcgatgacgacgaacacgcattttagaggtgaagaattgaagaaggtttggcttaaccgttatcccgcggacgttccgacggagatcaaccctgaccgttatcaatctctggtagatatgtttgagcagtcggtcgcgcgctacgccgatcaacctgcgtttgtgaatatgggggaggtaatgaccttccgcaagctggaagaacgcagtcgcgcgtttgccgcttatttgcaacaagggttggggctgaagaaaggcgatcgcgttgcgttgatgatgcctaatttattgcaatatccggtggcgctgtttggcattttgcgtgccgggatgatcgtcgtaaacgttaacccgttgtataccccgcgtgagcttgagcatcagcttaacgatagcggcgcatcggcgattgttatcgtgtctaactttgctcacacactggaaaaagtggttgataaaaccgccgttcagcacgtaattctgacccgtatgggcgatcagctatctacggcaaaaggcacggtagtcaatttcgttgttaaatacatcaagcgtttggtgccgaaataccatctgccagatgccatttcatttcgtagcgcactgcataacggctaccggatgcagtacgtcaaacccgaactggtgccggaagatttagcttttctgcaatacaccggcggcaccactggtgtggcgaaaggcgcgatgctgactcaccgcaatatgctggcgaacctggaacaggttaacgcgacctatggtccgctgttgcatccgggcaaagagctggtggtgacggcgctgccgctgtatcacatttttgccctgaccattaactgcctgctgtttatcgaactgggtgggcagaacctgcttatcactaacccgcgcgatattccagggttggtaaaagagttagcgaaatatccgtttaccgctatcacgggcgttaacaccttgttcaatgcgttgctgaacaataaagagttccagcagctggatttctccagtctgcatctttccgcaggcggtgggatgccagtgcagcaagtggtggcagagcgttgggtgaaactgaccggacagtatctgctggaaggctatggccttaccgagtgtgcgccgctggtcagcgttaacccatatgatattgattatcatagtggtagcatcggtttgccggtgccgtcgacggaagccaaactggtggatgatgatgataatgaagtaccaccaggtcaaccgggtgagctttgtgtcaaaggaccgcaggtgatgctgggttactggcagcgtcccgatgctaccgatgaaatcatcaaaaatggctggttacacaccggcgacatcgcggtaatggatgaagaaggattcctgcgcattgtcgatcgtaaaaaagacatgattctggtttccggttttaacgtctatcccaacgagattgaagatgtcgtcatgcagcatcctggcgtacaggaagtcgcggctgttggcgtaccttccggctccagtggtgaagcggtgaaaatcttcgtagtgaaaaaagatccatcgcttaccgaagagtcactggtgactttttgccgccgtcagctcacgggatacaaagtaccgaagctggtggagtttcgtgatgagttaccgaaatctaacgtcggaaaaattttgcgacgagaattacgtgacgaagcgcgcggcaaagtggacaataaagcctgagcgagaaggagttctatcatggcaattcagcaggtacatcacgcggacacgagcagcagcaaagtattgggtcaactgcgtggcaagcgtgtcctgattacgggcaccacgggtttcctgggtaaggtcgtgctggagcgcttgattcgcgctgtgccggacattggtgcgatctatttgttgatccgtggtaataagcgtcacccggatgcacgttctcgctttttggaagagatcgcgaccagctcggtgttcgatcgcctgcgtgaagcagactccgagggttttgacgcattcctggaagagcgcattcactgtgtgactggcgaggtcacggaagcaggttttggcatcggccaagaggactaccgcaaactggcgaccgaattggacgcggtgattaacagcgcagcgagcgtgaactttcgtgaagaactggacaaggcgctggcgatcaacactctgtgcctgcgcaatatcgcgggtatggtggatctgaatccaaaactggcggtcctgcaagttagcacttgctatgtgaacggtatgaacagcggtcaagttaccgaaagcgtgatcaagccggcaggtgaagcggttccgcgtagcccggatggtttttacgagattgaagagctggtgcgcctgctgcaggacaaaatcgaggacgttcaggctcgttatagcggcaaggtcctggagcgtaagctggttgatctgggcattcgtgaagcgaatcgttatggctggagcgacacgtacacgtttaccaagtggctgggtgagcagctgttgatgaaagcgctgaatggtcgcaccttgaccatcctgcgtccgagcattattgagtctgccctggaagaacctgcgcctggctggatcgagggtgtgaaggttgcagacgcaatcattctggcctatgcgcgtgagaaggttaccctgttcccgggtaagcgtagcggtattatcgatgtcatcccggttgacctggtcgccaacagcattattctgagcctggcggaagcgctgggcgagccaggccgtcgccgcatctatcaatgctgttctggtggtggtaacccgatcagcctgggtgagttcatcgaccatctgatggccgagagcaaagcaaattacgccgcatacgatcacctgttctaccgtcagccgtccaaaccgtttttggcggtcaatcgcgcgctgttcgatctggttattagcggtgttcgtctgccgctgagcctgacggatcgcgttctgaagctgttgggtaactcccgtgatctgaaaatgctgcgcaatctggacaccacccaatccctggccaccattttcggcttctataccgctccggactacatcttccgtaatgatgaactgatggccctggccaaccgtatgggcgaggtcgataaaggcctgtttccggttgatgcgcgtctgattgactgggagctgtacctgcgtaaaatccatctggctggcctgaaccgttacgcattgaaagaacgtaaagtctactcgctgaaaaccgctcgtcagcgcaaaaaggccgcgtaatgagtctggtaaagaaaccgctgctgcgaaatttgaacgcgtctggtaaagaaaccgctgctgcgaaatttgaacgccagcacatggactcgtctactagcgcagcttaattaacctaggctgctgccaccgctgagcaataactagcataaccccttggggcctctaaacgggtcttgaggggttttttgctgaaacctcaggcatttgagaagcacacggtcacactgcttccggtagtcaataaaccggtaaaccagcaatagacataagcggctatttaacgaccctgccctgaaccgacgaccgggtcatcgtggccggatcttgcggcccctcggcttgaacgaattgttagacattatttgccgactaccttggtgatctcgcctttcacgtagtggacaaattcttccaactgatctgcgcgcgaggccaagcgatcttcttcttgtccaagataagcctgtctagcttcaagtatgacgggctgatactgggccggcaggcgctccattgcccagtcggcagcgacatccttcggcgcgattttgccggttactgcgctgtaccaaatgcgggacaacgtaagcactacatttcgctcatcgccagcccagtcgggcggcgagttccatagcgttaaggtttcatttagcgcctcaaatagatcctgttcaggaaccggatcaaagagttcctccgccgctggacctaccaaggcaacgctatgttctcttgcttttgtcagcaagatagccagatcaatgtcgatcgtggctggctcgaagatacctgcaagaatgtcattgcgctgccattctccaaattgcagttcgcgcttagctggataacgccacggaatgatgtcgtcgtgcacaacaatggtgacttctacagcgcggagaatctcgctctctccaggggaagccgaagtttccaaaaggtcgttgatcaaagctcgccgcgttgtttcatcaagccttacggtcaccgtaaccagcaaatcaatatcactgtgtggcttcaggccgccatccactgcggagccgtacaaatgtacggccagcaacgtcggttcgagatggcgctcgatgacgccaactacctctgatagttgagtcgatacttcggcgatcaccgcttccctcatactcttcctttttcaatattattgaagcatttatcagggttattgtctcatgagcggatacatatttgaatgtatttagaaaaataaacaaatagctagctcactcggtcgctacgctccgggcgtgagactgcggcgggcgctgcggacacatacaaagttacccacagattccgtggataagcaggggactaacatgtgaggcaaaacagcagggccgcgccggtggcgtttttccataggctccgccctcctgccagagttcacataaacagacgcttttccggtgcatctgtgggagccgtgaggctcaaccatgaatctgacagtacgggcgaaacccgacaggacttaaagatccccaccgtttccggcgggtcgctccctcttgcgctctcctgttccgaccctgccgtttaccggatacctgttccgcctttctcccttacgggaagtgtggcgctttctcatagctcacacactggtatctcggctcggtgtaggtcgttcgctccaagctgggctgtaagcaagaactccccgttcagcccgactgctgcgccttatccggtaactgttcacttgagtccaacccggaaaagcacggtaaaacgccactggcagcagccattggtaactgggagttcgcagaggatttgtttagctaaacacgcggttgctcttgaagtgtgcgccaaagtccggctacactggaaggacagatttggttgctgtgctctgcgaaagccagttaccacggttaagcagttccccaactgacttaaccttcgatcaaaccacctccccaggtggttttttcgtttacagggcaaaagattacgcgcagaaaaaaaggatctcaagaagatcctttgatcttttctactgaaccgctctagatttcagtgcaatttatctcttcaaatgtagcacctgaagtcagccccatacgatataagttgtaattctcatgttagtcatgccccgcgcccaccggaaggagctgactgggttgaaggctctcaagggcatcggtcgagatcccggtgcctaatgagtgagctaacttacattaattgcgttgcgctcactgcccgctttccagtcgggaaacctgtcgtgccagctgcattaatgaatcggccaacgcgcggggagaggcggtttgcgtattgggcgccagggtggtttttcttttcaccagtgagacgggcaacagctgattgcccttcaccgcctggccctgagagagttgcagcaagcggtccacgctggtttgccccagcaggcgaaaatcctgtttgatggtggttaacggcgggatataacatgagctgtcttcggtatcgtcgtatcccactaccgagatgtccgcaccaacgcgcagcccggactcggtaatggcgcgcattgcgcccagcgccatctgatcgttggcaaccagcatcgcagtgggaacgatgccctcattcagcatttgcatggtttgttgaaaaccggacatggcactccagtcgccttcccgttccgctatcggctgaatttgattgcgagtgagatatttatgccagccagccagacgcagacgcgccgagacagaacttaatgggcccgctaacagcgcgatttgctggtgacccaatgcgaccagatgctccacgcccagtcgcgtaccgtcttcatgggagaaaataatactgttgatgggtgtctggtcagagacatcaagaaataacgccggaacattagtgcaggcagcttccacagcaatggcatcctggtcatccagcggatagttaatgatcagcccactgacgcgttgcgcgagaagattgtgcaccgccgctttacaggcttcgacgccgcttcgttctaccatcgacaccaccacgctggcacccagttgatcggcgcgagatttaatcgccgcgacaatttgcgacggcgcgtgcagggccagactggaggtggcaacgccaatcagcaacgactgtttgcccgccagttgttgtgccacgcggttgggaatgtaattcagctccgccatcgccgcttccactttttcccgcgttttcgcagaaacgtggctggcctggttcaccacgcgggaaacggtctgataagagacaccggcatactctgcgacatcgtataacgttactggtttcacattcaccaccctgaattgactctcttccgggcgctatcatgccataccgcgaaaggttttgcgccattcgatggtgtccgggatctcgacgctctcccttatgcgactcctgcattaggaaattaatacgactcactata

SEQ ID NO: 113 - DNA, 7272 bp, Artificial Sequence
  vector
ggggaattgtgagcggataacaattcccctgtagaaataattttgtttaactttaataaggagatatacgataacaattacgagcttcatgcacagtgatcgacgctgttgacaattaatcatcggctcgtataatgtgtggatgtggaattgtgagcgctcacaattccacaacggtttccctctagaaataattttgtttaacaggaggtaaaactaggaggtaaaaaaaatgacgaaaaagattagcttcatcatcaatggccaagtagagatttttccggaaagcgatgatctggtccaaagcatcaatttcggtgacaacagcgtttatctgccgatcctgaacgactcccacgtcaaaaacattatcgactgtaatggcaataatgaattgcgtctgcacaacatcgtcaacttcctgtataccgtgggtcaacgttggaaaaacgaagaatattcgcgtcgccgtacctatatccgcgacctgaaaaagtacatgggttacagcgaagaaatggcgaaactggaagccaactggattagcatgattttgtgcagcaagggtggtctgtacgacgtggtggaaaatgagctgggcagccgtcacatcatggatgagtggctgccgcaggacgagagctacgtgcgtgccttcccgaaaggcaaaagcgtgcacctgttggcaggtaacgtcccgttgtctggcattatgtccatcttgcgtgctattctgaccaaaaaccaatgcattatcaaaacgagcagcaccgacccttttacggccaatgcactggcattgtcgtttatcgacgtggacccgaatcacccgattactcgcagcctgtcggtgatttactggccgcatcagggcgacacctctctggcaaaagagattatgcgccacgcagacgttatcgtcgcttggggtggtccagatgctattaactgggcggtggagcacgctccgtcttacgccgatgtgatcaaattcggtagcaagaagtctctgtgtattatcgacaatccggttgacctgacctctgctgcaacgggtgccgctcatgatgtgtgcttctacgatcagcgtgcctgcttttccgcgcaaaacatctactatatgggcaatcattacgaagagttcaaattggctctgattgaaaagctgaatctgtatgcacatatcctgccgaacgcgaagaaagattttgatgagaaagcggcctacagcctggttcaaaaagaatcgctgttcgctggtctgaaagttgaagtagacattcaccagcgttggatgatcattgagagcaatgctggtgtggagtttaatcagccgctgggccgttgcgtgtatctgcaccatgttgataacattgagcagattctgccgtatgttcagaaaaacaaaacgcagaccatcagcatctttccgtgggaaagcagcttcaagtatcgtgatgccttggcgctgaaaggcgccgagcgcattgtcgaagcgggtatgaacaacattttccgcgtgggtggcagccatgacggtatgcgtccgctgcaacgtctggttacgtacatcagccacgaacgcccaagcaactataccgccaaggacgttgcggttgagatcgaacaaacccgctttttggaagaagataagtttctggtctttgttccataaaggaggtaaaaaaaatggagaacgaaagcaaatacaaaactattgaccatgtgatctgtgttgagggtaataagaagattcatgtctgggaaacgctgccggaagagaatagcccgaagcgcaaaaacgcgattatcatcgcgtccggttttgctcgccgtatggaccactttgcgggtttggctgagtacttgtcccgtaatggctttcacgttatccgttacgatagcctgcatcacgtgggtctgagcagcggtacgattgatgaatttaccatgtctattggcaaacagtcgctgctggcggtcgtggattggttgaccacgcgcaagatcaacaattttggtatgctggcgagcagcctgagcgcacgtattgcctatgcgagcttgagcgagatcaacgcctcgttcctgatcaccgcagtgggtgttgttaacttgcgttatagcctggaacgtgcactgggcttcgattatctgagcttgccaatcaatgagctgccagataatctggattttgagggtcataagctgggtgccgaggtgtttgcacgcgactgcctggactttggttgggaggatctggcaagcaccatcaataacatgatgtacctggacatcccattcattgcgttcacggccaacaatgataactgggtcaagcaggacgaagttattacgctgttgagcaatattcgtagcaatcgctgcaagatttactccctgctgggttcttctcacgacctgtcggagaacttggtggttctgcgtaatttctatcaatctgtgaccaaagcggcgattgcgatggacaatgatcacctggatattgacgttgacatcacggaaccgtccttcgagcacctgacgattgcgaccgtgaacgaacgtcgtatgcgtatcgagatcgaaaatcaggcgattagcctgagctaaaggaggtaaaaaaaatgaagggtatcaaagaatacgacagcagcgccgcaattctgagcaacatcattctgcgtagcaagacgggtatgaccagctacgtggacaagcaggaaatcaccgcttctagcgaaatcgacgatttgattttcagcagcgatcctctggtttggagctacgatgagcaagagaagatccgtaaaaagttggtcctggatgctttccgtaaccattacaagcactgtcgtgagtaccgtcactactgccaggcgcacaaggttgatgacaatatcactgaaattgacgacatcccggtctttcctacgtcggtgttcaagttcacgcgcctgctgacctctcaggaaaacgagatcgagagctggttcaccagctcgggtacgaacggtctgaaaagccaggttgcacgtgaccgcctgtccattgaacgtctgctgggctcggtgagctatggtatgaaatatgtcggtagctggtttgaccatcaaatcgagctggtaaacttgggtccggatcgtttcaatgcacataacatctggttcaagtacgtaatgagcctggtggaactgctgtacccgacgactttcaccgtcaccgaagagcgcatcgactttgtgaaaaccctgaactctctggaacgcatcaagaatcaaggtaaggacttgtgcctgattggcagcccgtacttcatttacctgctgtgtcactacatgaaagacaagaagatcagcttcagcggtgacaagagcttgtatatcatcacgggcggtggctggaaaagctacgagaaagaaagcctgaagcgtgacgactttaaccatctgctgtttgataccttcaatctgagcgacattagccagattcgtgacatctttaatcaagtcgagctgaacacttgtttcttcgaggatgaaatgcagcgtaaacacgtcccgccgtgggtgtatgcacgtgccctggacccggaaaccttgaagccggtcccggacggcaccccgggtttgatgtcctacatggacgccagcgcgaccagctatccggcgttcatcgttaccgatgacgtgggcatcatctcgcgcgaatacggcaaatacccgggtgttttggtcgagattctgcgtcgcgtgaacacccgtacccaaaagggttgcgcgttgagcctgaccgaggcgttcgatagctaagtctggtaaagaaaccgctgctgcgaaatttgaacgcgtctggtaaagaaaccgctgctgcgaaatttgaacgccagcacatggactcgtctactagcgcagcttaattaacctaggctgctgccaccgctgagcaataactagcataaccccttggggcctctaaacgggtcttgaggggttttttgctgaaacctcaggcatttgagaagcacacggtcacactgcttccggtagtcaataaaccggtaaaccagcaatagacataagcggctatttaacgaccctgccctgaaccgacgaccgggtcatcgtggccggatcttgcggcccctcggcttgaacgaattgttagacattatttgccgactaccttggtgatctcgcctttcacgtagtggacaaattcttccaactgatctgcgcgcgaggccaagcgatcttcttcttgtccaagataagcctgtctagcttcaagtatgacgggctgatactgggccggcaggcgctccattgcccagtcggcagcgacatccttcggcgcgattttgccggttactgcgctgtaccaaatgcgggacaacgtaagcactacatttcgctcatcgccagcccagtcgggcggcgagttccatagcgttaaggtttcatttagcgcctcaaatagatcctgttcaggaaccggatcaaagagttcctccgccgctggacctaccaaggcaacgctatgttctcttgcttttgtcagcaagatagccagatcaatgtcgatcgtggctggctcgaagatacctgcaagaatgtcattgcgctgccattctccaaattgcagttcgcgcttagctggataacgccacggaatgatgtcgtcgtgcacaacaatggtgacttctacagcgcggagaatctcgctctctccaggggaagccgaagtttccaaaaggtcgttgatcaaagctcgccgcgttgtttcatcaagccttacggtcaccgtaaccagcaaatcaatatcactgtgtggcttcaggccgccatccactgcggagccgtacaaatgtacggccagcaacgtcggttcgagatggcgctcgatgacgccaactacctctgatagttgagtcgatacttcggcgatcaccgcttccctcatactcttcctttttcaatattattgaagcatttatcagggttattgtctcatgagcggatacatatttgaatgtatttagaaaaataaacaaatagctagctcactcggtcgctacgctccgggcgtgagactgcggcgggcgctgcggacacatacaaagttacccacagattccgtggataagcaggggactaacatgtgaggcaaaacagcagggccgcgccggtggcgtttttccataggctccgccctcctgccagagttcacataaacagacgcttttccggtgcatctgtgggagccgtgaggctcaaccatgaatctgacagtacgggcgaaacccgacaggacttaaagatccccaccgtttccggcgggtcgctccctcttgcgctctcctgttccgaccctgccgtttaccggatacctgttccgcctttctcccttacgggaagtgtggcgctttctcatagctcacacactggtatctcggctcggtgtaggtcgttcgctccaagctgggctgtaagcaagaactccccgttcagcccgactgctgcgccttatccggtaactgttcacttgagtccaacccggaaaagcacggtaaaacgccactggcagcagccattggtaactgggagttcgcagaggatttgtttagctaaacacgcggttgctcttgaagtgtgcgccaaagtccggctacactggaaggacagatttggttgctgtgctctgcgaaagccagttaccacggttaagcagttccccaactgacttaaccttcgatcaaaccacctccccaggtggttttttcgtttacagggcaaaagattacgcgcagaaaaaaaggatctcaagaagatcctttgatcttttctactgaaccgctctagatttcagtgcaatttatctcttcaaatgtagcacctgaagtcagccccatacgatataagttgtaattctcatgttagtcatgccccgcgcccaccggaaggagctgactgggttgaaggctctcaagggcatcggtcgagatcccggtgcctaatgagtgagctaacttacattaattgcgttgcgctcactgcccgctttccagtcgggaaacctgtcgtgccagctgcattaatgaatcggccaacgcgcggggagaggcggtttgcgtattgggcgccagggtggtttttcttttcaccagtgagacgggcaacagctgattgcccttcaccgcctggccctgagagagttgcagcaagcggtccacgctggtttgccccagcaggcgaaaatcctgtttgatggtggttaacggcgggatataacatgagctgtcttcggtatcgtcgtatcccactaccgagatgtccgcaccaacgcgcagcccggactcggtaatggcgcgcattgcgcccagcgccatctgatcgttggcaaccagcatcgcagtgggaacgatgccctcattcagcatttgcatggtttgttgaaaaccggacatggcactccagtcgccttcccgttccgctatcggctgaatttgattgcgagtgagatatttatgccagccagccagacgcagacgcgccgagacagaacttaatgggcccgctaacagcgcgatttgctggtgacccaatgcgaccagatgctccacgcccagtcgcgtaccgtcttcatgggagaaaataatactgttgatgggtgtctggtcagagacatcaagaaataacgccggaacattagtgcaggcagcttccacagcaatggcatcctggtcatccagcggatagttaatgatcagcccactgacgcgttgcgcgagaagattgtgcaccgccgctttacaggcttcgacgccgcttcgttctaccatcgacaccaccacgctggcacccagttgatcggcgcgagatttaatcgccgcgacaatttgcgacggcgcgtgcagggccagactggaggtggcaacgccaatcagcaacgactgtttgcccgccagttgttgtgccacgcggttgggaatgtaattcagctccgccatcgccgcttccactttttcccgcgttttcgcagaaacgtggctggcctggttcaccacgcgggaaacggtctgataagagacaccggcatactctgcgacatcgtataacgttactggtttcacattcaccaccctgaattgactctcttccgggcgctatcatgccataccgcgaaaggttttgcgccattcgatggtgtccgggatctcgacgctctcccttatgcgactcctgcattaggaaattaatacgactcactata

SEQ ID NO: 114 - DNA, 1107 bp, Mycobacterium marinum
  CDS (1)..(1107)
atgccaagagagattagattaccagaatcgtcagtagtagtaagaccagcaccgatggagagcgcgacctatagccaatccagccgtctgcaggcagcgggtctgagcccggcaattaccttgttcgagaaagcggcccagacggttccgctgccggacgcaccgcaaccggtggtcattgccgactacggtgtggcgaccggccacaacagcctgaagccgatgatggcggcgatcaacgcgctgcgtcgccgcatccgtgaagatcgtgctattatggtggcccacaccgacgtgccggacaacgactttacggcgctgttccgtaccttggcagatgatccggacagctatctgcaccatgatagcgcaagcttcgcgagcgcggtgggtcgcagcttttacacgcaaatcctgccgagcaatactgttagcctgggctggtcctcttgggcgatccagtggctgtctcgcatccctgccggtgcgccggaactgactgaccatgtccaagtcgcttacagcaaggatgagcgtgcgcgtgcggcctatgcgcatcaggcagcgaccgactggcaagacttcctggcttttcgtggccgtgaactgtgcccgggtggccgtctggtcgtcctgaccatggcgctggatgagcacggccactttggttaccgcccgatgaatgacgctctggttgcggcactgaatgaccaggttcgtgatggcctgttgcgtccggaagagttgcgccgcatggcgattccggttgtggctcgtgcggagaaagatctgcgcgcaccgttcgcaccgcgtggttggtttgagggtctgacgatcgaacaactggatgtgtttaacgccgaggatcgcttctgggcggcttttcagagcgatggtgacgcagagagcttcggtgcgcagtgggctggcttcgcacgtgcagccctgttcccgaccctggcagccgccctggactgtggcacgggtgacccgcgtgcgaccgcgtttattgagcagctggaagcgtccgttgcggatcgcctggcatctcaacctgaaccgatgcgtatcccgttggccagcttggttctggcgaaacgtgcctaa

SEQ ID NO: 115 - protein, 368 aa, Mycobacterium marinum
MPREIRLPESSVVVRPAPMESATYSQSSRLQAAGLSPAITLFEKAAQTVPLPDAPQPVVIADYGVATGHNSLKPMMAAINALRRRIREDRAIMVAHTDVPDNDFTALFRTLADDPDSYLHHDSASFASAVGRSFYTQILPSNTVSLGWSSWAIQWLSRIPAGAPELTDHVQVAYSKDERARAAYAHQAATDWQDFLAFRGRELCPGGRLVVLTMALDEHGHFGYRPMNDALVAALNDQVRDGLLRPEELRRMAIPVVARAEKDLRAPFAPRGWFEGLTIEQLDVFNAEDRFWAAFQSDGDAESFGAQWAGFARAALFPTLAAALDCGTGDPRATAFIEQLEASVADRLASQPEPMRIPLASLVLAKRA

SEQ ID NO: 116 - DNA, 5444 bp, Artificial Sequence
  vector
actagagaataggaacttcactatagagtcgaataagggcgacaccccctaattagcccgggcgaaaggcccagtctttcgactgagcctttcgttttatttgatgcctggcagttccctactctcgcatggggagtccccacactaccatcggcgctacggcgtttcacttctgagttcggcatggggtcaggtgggaccaccgcgctactgccgccaggcaaacaaggggtgttatgagccatattcaggtataaatgggctcgcgataatgttcagaattggttaattggttgtaacactgacccctatttgtttatttttctaaatacattcaaatatgtatccgctcatgagacaataaccctgataaatgcttcaataatattgaaaaaggaagaatatgagccatattcaacgggaaacgtcgaggccgcgattaaattccaacatggatgctgatttatatgggtataaatgggctcgcgataatgtcgggcaatcaggtgcgacaatctatcgcttgtatgggaagcccgatgcgccagagttgtttctgaaacatggcaaaggtagcgttgccaatgatgttacagatgagatggtcagactaaactggctgacggaatttatgccacttccgaccatcaagcattttatccgtactcctgatgatgcatggttactcaccactgcgatccccggaaaaacagcgttccaggtattagaagaatatcctgattcaggtgaaaatattgttgatgcgctggcagtgttcctgcgccggttgcactcgattcctgtttgtaattgtccttttaacagcgatcgcgtatttcgcctcgctcaggcgcaatcacgaatgaataacggtttggttgatgcgagtgattttgatgacgagcgtaatggctggcctgttgaacaagtctggaaagaaatgcataaacttttgccattctcaccggattcagtcgtcactcatggtgatttctcacttgataaccttatttttgacgaggggaaattaataggttgtattgatgttggacgagtcggaatcgcagaccgataccaggatcttgccatcctatggaactgcctcggtgagttttctccttcattacagaaacggctttttcaaaaatatggtattgataatcctgatatgaataaattgcagtttcatttgatgctcgatgagtttttctaaaagcggcgcgccatcgaatggcgcaaaacctttcgcggtatggcatgatagcgcccggaagagagtcaattcagggtggtgaatatgaaaccagtaacgttatacgatgtcgcagagtatgccggtgtctcttatcagaccgtttcccgcgtggtgaaccaggccagccacgtttctgcgaaaacgcgggaaaaagtggaagcggcgatggcggagctgaattacattcccaaccgcgtggcacaacaactggcgggcaaacagtcgttgctgattggcgttgccacctccagtctggccctgcacgcgccgtcgcaaattgtcgcggcgattaaatctcgcgccgatcaactgggtgccagcgtggtggtgtcgatggtagaacgaagcggcgtcgaagcctgtaaagcggcggtgcacaatcttctcgcgcaacgcgtcagtgggctgatcattaactatccgctggatgaccaggatgccattgctgtggaagctgcctgcactaatgttccggcgttatttcttgatgtctctgaccagacacccatcaacagtattattttctcccatgaggacggtacgcgactgggcgtggagcatctggtcgcattgggtcaccagcaaatcgcgctgttagcgggcccattaagttctgtctcggcgcgtctgcgtctggctggctggcataaatatctcactcgcaatcaaattcagccgatagcggaacgggaaggcgactggagtgccatgtccggttttcaacaaaccatgcaaatgctgaatgagggcatcgttcccactgcgatgctggttgccaacgatcagatggcgctgggcgcaatgcgcgccattaccgagtccgggctgcgcgttggtgcggatatctcggtagtgggatacgacgataccgaagatagctcatgttatatcccgccgttaaccaccatcaaacaggattttcgcctgctggggcaaaccagcgtggaccgcttgctgcaactctctcagggccaggcggtgaagggcaatcagctgttgccagtctcactggtgaaaagaaaaaccaccctggcgcccaatacgcaaaccgcctctccccgcgcgttggccgattcattaatgcagctggcacgacaggtttcccgactggaaagcgggcagtgactcatgaccaaaatcccttaacgtgagttacgcgcgcgtcgttccactgagcgtcagaccccgtagaaaagatcaaaggatcttcttgagatcctttttttctgcgcgtaatctgctgcttgcaaacaaaaaaaccaccgctaccagcggtggtttgtttgccggatcaagagctaccaactctttttccgaaggtaactggcttcagcagagcgcagataccaaatactgttcttctagtgtagccgtagttagcccaccacttcaagaactctgtagcaccgcctacatacctcgctctgctaatcctgttaccagtggctgctgccagtggcgataagtcgtgtcttaccgggttggactcaagacgatagttaccggataaggcgcagcggtcgggctgaacggggggttcgtgcacacagcccagcttggagcgaacgacctacaccgaactgagatacctacagcgtgagctatgagaaagcgccacgcttcccgaagggagaaaggcggacaggtatccggtaagcggcagggtcggaacaggagagcgcacgagggagcttccagggggaaacgcctggtatctttatagtcctgtcgggtttcgccacctctgacttgagcgtcgatttttgtgatgctcgtcaggggggcggagcctatggaaaaacgccagcaacgcggcctttttacggttcctggccttttgctggccttttgctcacatgttctttcctgcgttatcccctgattctgtggataaccgtattaccgcctttgagtgagctgataccgctcgccgcagccgaacgaccgagcgcagcgagtcagtgagcgaggaagcggaaggcgagagtagggaactgccaggcatcaaactaagcagaaggcccctgacggatggcctttttgcgtttctacaaactctttctgtgttgtaaaacgacggccagtcttaagctcgggccccctgggcggttctgataacgagtaatcgttaatccgcaaataacgtaaaaacccgcttcggcgggtttttttatggggggagtttagggaaagagcatttgtcagaatatttaagggcgcctgtcactttgcttgatatatgagaattatttaaccttataaatgagaaaaaagcaacgcactttaaataagatacgttgctttttcgattgatgaacacctataattaaactattcatctattatttatgattttttgtatatacaatatttctagtttgttaaagagaattaagaaaataaatctcgaaaataataaagggaaaatcagtttttgatatcaaaattatacatgtcaacgataatacaaaatataatacaaactataagatgttatcagtatttattatgcatttagaataaattttgtgtcgcccttattcgactcactatagaagttcctattctctagtaagtataggaacttcacttcattttggatccggccggcctgcagccccgcagggcctgtctcggtcgatcattcagcccggctcatagatatgcgggcagtgagcgcaacgcaattaatgtaagttagctcactcattaggcaccccaggcttgacactttatgcttccggctcgtataatgtgtggaattgtgagcggataacaataacaatttcacacaggatctaggaaccaaggagagtggcatatgccaagagagattagattaccagaatcgtcagtagtagtaagaccagcaccgatggagagcgcgacctatagccaatccagccgtctgcaggcagcgggtctgagcccggcaattaccttgttcgagaaagcggcccagacggttccgctgccggacgcaccgcaaccggtggtcattgccgactacggtgtggcgaccggccacaacagcctgaagccgatgatggcggcgatcaacgcgctgcgtcgccgcatccgtgaagatcgtgctattatggtggcccacaccgacgtgccggacaacgactttacggcgctgttccgtaccttggcagatgatccggacagctatctgcaccatgatagcgcaagcttcgcgagcgcggtgggtcgcagcttttacacgcaaatcctgccgagcaatactgttagcctgggctggtcctcttgggcgatccagtggctgtctcgcatccctgccggtgcgccggaactgactgaccatgtccaagtcgcttacagcaaggatgagcgtgcgcgtgcggcctatgcgcatcaggcagcgaccgactggcaagacttcctggcttttcgtggccgtgaactgtgcccgggtggccgtctggtcgtcctgaccatggcgctggatgagcacggccactttggttaccgcccgatgaatgacgctctggttgcggcactgaatgaccaggttcgtgatggcctgttgcgtccggaagagttgcgccgcatggcgattccggttgtggctcgtgcggagaaagatctgcgcgcaccgttcgcaccgcgtggttggtttgagggtctgacgatcgaacaactggatgtgtttaacgccgaggatcgcttctgggcggcttttcagagcgatggtgacgcagagagcttcggtgcgcagtgggctggcttcgcacgtgcagccctgttcccgaccctggcagccgccctggactgtggcacgggtgacccgcgtgcgaccgcgtttattgagcagctggaagcgtccgttgcggatcgcctggcatctcaacctgaaccgatgcgtatcccgttggccagcttggttctggcgaaacgtgcctaactcagtctagatcaacaactctcctggcgcaccatcgtcggctacagcctcgggaattgctgcaagtcgacggatcgccggaattaattctcatgtttgacagcttatcactgatcagtgaattaatggcgatgacgcatcctcacgataatatccgggtaggcgcaatcactttcgtctctactccgttacaaagcgaggctgggtatttcccggcctttttgggccggccggatccccccacttcagaagttcctatac

SEQ ID NO: 117 - DNA, 3507 bp, Mycobacterium smegmatis
  CDS (1)..(3507)
atgacaattgaaacgcgcgaagatagatttaacagacgtattgatcacctttttgaaacagacccgcagttcgcagcggcacgtccggacgaagctattagcgctgcagcagccgatccggagctgcgcctgccagccgcagtcaagcagattctggccggttatgcggaccgtccggccctgggtaagcgtgctgtggagttcgttacggacgaagaaggccgtaccaccgcaaagttgctgccgcgtttcgatacgatcacctaccgtcaattggcaggtcgtattcaggcggtgactaacgcgtggcacaatcacccggtgaatgcgggtgaccgtgtcgcaattttgggcttcacgagcgttgactatacgaccatcgatatcgcactgctggaactgggtgctgttagcgttccgttgcaaacgtctgctccggttgcgcagctgcaaccgattgtggccgaaaccgagccgaaggtcattgcgagcagcgtcgatttcctggcagatgcggtcgcactggttgagagcggtccagccccgagccgtctggtcgtttttgattatagccacgaggtcgacgatcagcgtgaggccttcgaagcggccaagggtaaactggcgggtaccggtgttgtggtggaaacgattacggatgtcttggatcgcggtcgcagcctggctgatgcgccgctgtatgtcccagacgaaacggacccgctgaccctgctgatctataccagcggtagcaccggtacgccgaagggtgctatgtatccggaatccaagaccgcgacgatgtggcaagctggtagcaaggcgcgttgggatgaaaccctgggcgttatgccgagcatcaccctgaacttcatgccaatgtcccacgtgatgggtcgcggcatcctgtgtagcaccctggcgagcggcggtactgcgtattttgccgcacgtagcgacttgtctacctttctggaggacctggcgttggtccgcccgacccaactgaatttcgtccctcgcatctgggatatgctgttccaagagtatcagagccgtctggacaatcgtcgtgccgagggtagcgaggatcgcgcggaagcggccgtactggaagaggttcgtacccaattgctgggcggtcgtttcgtttccgctctgaccggtagcgctccaatcagcgcggaaatgaaaagctgggtcgaggacctgctggacatgcatttgctggaaggttacggttccaccgaggcgggtgccgtgttcattgacggtcaaatccaacgtccacctgttatcgattacaaactggttgatgttccggacttgggttactttgcgaccgatcgtccataccctcgcggcgagctgctggtgaagagcgagcagatgttcccgggctactataagcgtccggagattacggcggagatgtttgacgaggacggttattaccgtaccggcgacatcgtggccgaactgggtccggatcatctggagtatctggaccgccgtaacaacgtcctgaagctgagccagggtgagtttgttaccgtttccaaactggaagcggtctttggcgatagcccactggtgcgccagatttatgtctacggtaactctgcacgcagctatctgctggcggttgtcgttccgaccgaagaggcactgagccgctgggacggcgatgaactgaagagccgcatcagcgacagcttgcaagatgcggcacgtgccgcaggtttgcaaagctatgagatcccgcgtgactttctggttgaaaccacgccgttcacgttggagaacggtctgctgaccggcattcgcaaactggcgcgtccgaagctgaaagcgcattatggcgaacgtctggaacaactgtacacggatctggctgaaggccaagccaatgagctgcgtgaactgcgccgtaatggtgcggatcgtccggttgttgaaacggtttcgcgtgccgcggtcgccttgctgggtgcgtctgtgacggacctgcgttctgacgcccactttacggacctgggcggtgattccctgagcgccctgagcttcagcaacctgctgcacgagatttttgacgtcgatgtcccggtgggcgtgattgtcagcccggcaaccgacctggccggtgttgccgcctatattgagggtgagctgcgtggtagcaaacgtccgacctacgcaagcgtccacggtcgtgacgcaaccgaggtgcgtgctcgcgatctggcgctgggcaaattcatcgacgcaaaaacgctgagcgcagcaccgggtctgccgcgctccggtacggagatccgtacggtgctgctgacgggtgcgaccggttttctgggtcgctacttggccttggagtggctggaacgtatggacctggttgacggcaaggtgatctgtttggttcgtgcgcgtagcgacgacgaagcacgtgcgcgtctggacgcaaccttcgataccggcgatgctaccttgctggagcactaccgtgccctggcggctgaccatctggaagttattgcgggtgataagggtgaagccgacttgggcctggatcacgatacctggcagcgtctggcagatacggtcgacctgatcgttgacccggctgcgctggttaaccacgttttgccgtacagccagatgttcggcccaaacgctctgggcactgcagagctgattcgcattgcactgaccaccaccattaaaccgtacgtctacgtgagcaccattggtgttggtcagggcatcagcccagaagcctttgttgaagatgcggacatccgcgaaatcagcgccacgcgtcgcgttgacgacagctacgcgaatggttatggtaacagcaaatgggcaggtgaggttctgctgcgcgaagcgcacgactggtgcggcctgccggtgagcgtgtttcgttgtgacatgatcttggccgacaccacctactccggccagctgaatctgccggatatgttcacccgtctgatgttgagcctggtggcaactggcatcgcaccgggcagcttttatgagctggacgcggacggtaatcgtcaacgtgcacattatgatggtctgccggtggagtttatcgcggaagcaatcagcacgatcggctctcaagtgactgacggtttcgaaacgttccatgtcatgaatccttatgatgatggtatcggcctggacgagtacgtcgactggctgattgaggctggctacccggttcaccgtgttgatgattatgcgacgtggttgagccgttttgaaaccgccttgcgtgcgctgccggagcgtcaacgtcaggcatccctgctgccgctgttgcacaactaccagcagccttctccgccggtttgcggtgctatggctcctaccgaccgtttccgtgcagctgtccaggacgccaaaattggcccagataaagacatcccacatgtaacggcggacgtgatcgtgaaatacattagcaacttgcagatgctgggtctgctgtaa

SEQ ID NO: 118 - protein, 1168 aa, Mycobacterium smegmatis
MTIETREDRFNRRIDHLFETDPQFAAARPDEAISAAAADPELRLPAAVKQILAGYADRPALGKRAVEFVTDEEGRTTAKLLPRFDTITYRQLAGRIQAVTNAWHNHPVNAGDRVAILGFTSVDYTTIDIALLELGAVSVPLQTSAPVAQLQPIVAETEPKVIASSVDFLADAVALVESGPAPSRLVVFDYSHEVDDQREAFEAAKGKLAGTGVVVETITDVLDRGRSLADAPLYVPDETDPLTLLIYTSGSTGTPKGAMYPESKTATMWQAGSKARWDETLGVMPSITLNFMPMSHVMGRGILCSTLASGGTAYFAARSDLSTFLEDLALVRPTQLNFVPRIWDMLFQEYQSRLDNRRAEGSEDRAEAAVLEEVRTQLLGGRFVSALTGSAPISAEMKSWVEDLLDMHLLEGYGSTEAGAVFIDGQIQRPPVIDYKLVDVPDLGYFATDRPYPRGELLVKSEQMFPGYYKRPEITAEMFDEDGYYRTGDIVAELGPDHLEYLDRRNNVLKLSQGEFVTVSKLEAVFGDSPLVRQIYVYGNSARSYLLAVVVPTEEALSRWDGDELKSRISDSLQDAARAAGLQSYEIPRDFLVETTPFTLENGLLTGIRKLARPKLKAHYGERLEQLYTDLAEGQANELRELRRNGADRPVVETVSRAAVALLGASVTDLRSDAHFTDLGGDSLSALSFSNLLHEIFDVDVPVGVIVSPATDLAGVAAYIEGELRGSKRPTYASVHGRDATEVRARDLALGKFIDAKTLSAAPGLPRSGTEIRTVLLTGATGFLGRYLALEWLERMDLVDGKVICLVRARSDDEARARLDATFDTGDATLLEHYRALAADHLEVIAGDKGEADLGLDHDTWQRLADTVDLIVDPAALVNHVLPYSQMFGPNALGTAELIRIALTTTIKPYVYVSTIGVGQGISPEAFVEDADIREISATRRVDDSYANGYGNSKWAGEVLLREAHDWCGLPVSVFRCDMILADTTYSGQLNLPDMFTRLMLSLVATGIAPGSFYELDADGNRQRAHYDGLPVEFIAEAISTIGSQVTDGFETFHVMNPYDDGIGLDEYVDWLIEAGYPVHRVDDYATWLSRFETALRALPERQRQASLLPLLHNYQQPSPPVCGAMAPTDRFRAAVQDAKIGPDKDIPHVTADVIVKYISNLQMLGLL

SEQ ID NO: 119 - DNA, 32 bp, Artificial Sequence
  primer
tatatacatatgccaagagagattagattacc

SEQ ID NO: 120 - DNA, 31 bp, Artificial Sequence
  primer
tatatatctagactgagttaggcacgtttcg

SEQ ID NO: 121 - DNA, 6855 bp, Artificial Sequence
  vector
gtataggaacttctgaagtggggggatccggccggcccaaaaaggccgggaaatacccagcctcgctttgtaacggagtagagacgaaagtgattgcgcctacccggatattatcgtgaggatgcgtcatcgccattaattcactgatcagtgataagctgtcaaacatgagaattaattccggcgatccgtcgacttgcagcaattcccgaggctgtagccgacgatggtgcgccaggagagttgttgatctagattattaggcgaggccacgcgctttgagggtctgttcaaattcttcgaggcaacgttccgccacggcgagcatttcatccacttccgcacgggtcataacgagcggcggtgcagacacaatgtgatcgccgcacgcacgcataatgaggttgttgcgaaaaaaaatatcgcggcagagggtgccaatttcgccaaaatccggaaagagttcacgtttcgctttgtttttcacgagggtaaacgcctgcaccatgcccacgccacgcacatcatccacatgttcaaaacggctaaaggtttcacgccaacgtttctgcatatacgggccaatatcatctttcacacgctgcacaatgccttcatcacggagcgccgcaacattcgcatgcgccaccgccgcacacaccggatggccgctataggtaaagccatggttaaaatcaccgcccgcaatgagaccttccgcaacacgtttgcccacaaacaccgcgccaatcgggagatagccgctgctgaggcctttcgccgcggtaaagaggtccggctgaaagccaaaatgctgatggccaaaccattcgccggtacggccaaagccgcaaatcacttcatccgcaacgaggagcacatcatatttgcggcaaatacgttcaatttccggccaataggttgccggcggaacaatcacaccgcccgcaccctgaatcggttcgcccacaaacgccgccactttatccgcgccgatttcgagaattttttcttcgagccaacgcgccgcaaccacgccaaattcatccggggtcatatctttgccatgtttataccaccacggctgttcaatatgcgccatgcccggaatcgggagatcgccctgttcatgcatatatttcatgccgccgaggctcgcaccgccaatggtgctgccgtgatagccgttccaacggccaatgagggtttttttttccggtttgccctgcacatcccaataacgacgcaccatacgaatcatggtatccacgctttcgctgccgctgttggtataaaacacacgatcaaaacctgccggggtaacttcggcgaggaggctgctgagttccaccaccgccggatgggtggttttaaagaaggtgttataaaacgggagttcttccatctgacgacgcgccgcttccgcaaaatctttacggccatagcccacgttcacgcaccagaggcccgccatgccatcaataattttgttgccttcgctatcccagagatacacgccttcgccacgggtcatcacacgcgcacccgcctgattgaggctcgcggtatcggtaaacggatggagatgatgcgccgcatcgagttcacgccactgagaggtggtacgctgtttctgcatattatatctccttaaagcttattattggattaattcatccacattcacataaggcaagccttgtgcttctgctaccgctttataagtaatatgcccctctaatgcattcacaccttttttcaatgcaggattgtcaatacatgcttgcttatagcctttattggcaatttgcaacgcataaggaattgtattatttgttaaagcaatcgttgaagtacgtggcacagcccctggcatatttgcaacagcataatggactaccccatgtttaacatacgttggatcatcatgtgttgtaacacgatcagatgtcgcaaaaattccaccttggtcaatcgcaatatccacaacaacagaacctggttgcatcgattgaatcatttcttccgaaactaactttggagcctttgcaccaggaattagaacagcaccgacaactaaatctgagtgtttcacagattctgcaatattatacgggttagacattaatgtttgaacatcgcgaccaaacatatcttctaattgacgtagacgttctggacttaaatcaataactgttacgtctgctcccataccaactgcaattttcgcagcgtttgttcccgcgattccgccaccaattactgttactttacgcgcgtgtacacctgatacaccgcctagtaaaatccctttaccaccgtgatttttctctaaatattgcgcaccaatttgtgttgccattttaccagctacttcactcattggtgttaataaaggtagtgaaccatttgcaagttgaaccgtttcataggcaatacctacaacttttttatctattaatgcctgcgttaattcagctctgggcgctaagtgcaagtaggtaaataagatttgtccctcataaaagtaatcgtattccgatgctacgggttcttttacttttaaaatcatttcttgagcccacgcttctttgccgatgcaacgatatgctgcacctgctgctacgtactctgcatctgtaaaacttgaaccgataccacctcctgtttcaatagctaacctctcgtgcccagcatgcgttaaggatacaactcctgctggtgtcattgctacgcgattttcgttgtttttaatttcctttggaataccaatcttcatatgccactctccttggttcctagatcctgtgtgaaattgttattgttatccgctcacaattccacacattatacgagccggaagcataaagtgtcaagcctggggtgcctaatgagtgagctaacttacattaattgcgttgcgctcactgcccgcatatctatgagccgggctgaatgatcgaccgagacaggccctgcggggctgcaggccggccggatccaaaatgaagtgaagttcctatacttactagagaataggaacttctatagtgagtcgaataagggcgacacaaaatttattctaaatgcataataaatactgataacatcttatagtttgtattatattttgtattatcgttgacatgtataattttgatatcaaaaactgattttccctttattattttcgagatttattttcttaattctctttaacaaactagaaatattgtatatacaaaaaatcataaataatagatgaatagtttaattataggtgttcatcaatcgaaaaagcaacgtatcttatttaaagtgcgttgcttttttctcatttataaggttaaataattctcatatatcaagcaaagtgacaggcgcccttaaatattctgacaaatgctctttccctaaactccccccataaaaaaacccgccgaagcgggtttttacgttatttgcggattaacgattactcgttatcagaaccgcccagggggcccgagcttaagactggccgtcgttttacaacacagaaagagtttgtagaaacgcaaaaaggccatccgtcaggggccttctgcttagtttgatgcctggcagttccctactctcgccttccgcttcctcgctcactgactcgctgcgctcggtcgttcggctgcggcgagcggtatcagctcactcaaaggcggtaatacggttatccacagaatcaggggataacgcaggaaagaacatgtgagcaaaaggccagcaaaaggccaggaaccgtaaaaaggccgcgttgctggcgtttttccataggctccgcccccctgacgagcatcacaaaaatcgacgctcaagtcagaggtggcgaaacccgacaggactataaagataccaggcgtttccccctggaagctccctcgtgcgctctcctgttccgaccctgccgcttaccggatacctgtccgcctttctcccttcgggaagcgtggcgctttctcatagctcacgctgtaggtatctcagttcggtgtaggtcgttcgctccaagctgggctgtgtgcacgaaccccccgttcagcccgaccgctgcgccttatccggtaactatcgtcttgagtccaacccggtaagacacgacttatcgccactggcagcagccactggtaacaggattagcagagcgaggtatgtaggcggtgctacagagttcttgaagtggtgggctaactacggctacactagaagaacagtatttggtatctgcgctctgctgaagccagttaccttcggaaaaagagttggtagctcttgatccggcaaacaaaccaccgctggtagcggtggtttttttgtttgcaagcagcagattacgcgcagaaaaaaaggatctcaagaagatcctttgatcttttctacggggtctgacgctcagtggaacgacgcgcgcgtaactcacgttaagggattttggtcatgagtcactgcccgctttccagtcgggaaacctgtcgtgccagctgcattaatgaatcggccaacgcgcggggagaggcggtttgcgtattgggcgccagggtggtttttcttttcaccagtgagactggcaacagctgattgcccttcaccgcctggccctgagagagttgcagcaagcggtccacgctggtttgccccagcaggcgaaaatcctgtttgatggtggttaacggcgggatataacatgagctatcttcggtatcgtcgtatcccactaccgagatatccgcaccaacgcgcagcccggactcggtaatggcgcgcattgcgcccagcgccatctgatcgttggcaaccagcatcgcagtgggaacgatgccctcattcagcatttgcatggtttgttgaaaaccggacatggcactccagtcgccttcccgttccgctatcggctgaatttgattgcgagtgagatatttatgccagccagccagacgcagacgcgccgagacagaacttaatgggcccgctaacagcgcgatttgctggtgacccaatgcgaccagatgctccacgcccagtcgcgtaccgtcctcatgggagaaaataatactgttgatgggtgtctggtcagagacatcaagaaataacgccggaacattagtgcaggcagcttccacagcaatggcatcctggtcatccagcggatagttaatgatcagcccactgacgcgttgcgcgagaagattgtgcaccgccgctttacaggcttcgacgccgcttcgttctaccatcgacaccaccacgctggcacccagttgatcggcgcgagatttaatcgccgcgacaatttgcgacggcgcgtgcagggccagactggaggtggcaacgccaatcagcaacgactgtttgcccgccagttgttgtgccacgcggttgggaatgtaattcagctccgccatcgccgcttccactttttcccgcgttttcgcagaaacgtggctggcctggttcaccacgcgggaaacggtctgataagagacaccggcatactctgcgacatcgtataacgttactggtttcatattcaccaccctgaattgactctcttccgggcgctatcatgccataccgcgaaaggttttgcgccattcgatggcgcgccgcttttagaaaaactcatcgagcatcaaatgaaactgcaatttattcatatcaggattatcaataccatatttttgaaaaagccgtttctgtaatgaaggagaaaactcaccgaggcagttccataggatggcaagatcctggtatcggtctgcgattccgactcgtccaacatcaatacaacctattaatttcccctcgtcaaaaataaggttatcaagtgagaaatcaccatgagtgacgactgaatccggtgagaatggcaaaagtttatgcatttctttccagacttgttcaacaggccagccattacgctcgtcatcaaaatcactcgcatcaaccaaaccgttattcattcgtgattgcgcctgagcgaggcgaaatacgcgatcgctgttaaaaggacaattacaaacaggaatcgagtgcaaccggcgcaggaacactgccagcgcatcaacaatattttcacctgaatcaggatattcttctaatacctggaacgctgtttttccggggatcgcagtggtgagtaaccatgcatcatcaggagtacggataaaatgcttgatggtcggaagtggcataaattccgtcagccagtttagtctgaccatctcatctgtaacatcattggcaacgctacctttgccatgtttcagaaacaactctggcgcatcgggcttcccatacaagcgatagattgtcgcacctgattgcccgacattatcgcgagcccatttatacccatataaatcagcatccatgttggaatttaatcgcggcctcgacgtttcccgttgaatatggctcatattcttcctttttcaatattattgaagcatttatcagggttattgtctcatgagcggatacatatttgaatgtatttagaaaaataaacaaataggggtcagtgttacaaccaattaaccaattctgaacattatcgcgagcccatttatacctgaatatggctcataacaccccttgtttgcctggcggcagtagcgcggtggtcccacctgaccccatgccgaactcagaagtgaaacgccgtagcgccgatggtagtgtggggactccccatgcgagagtagggaactgccaggcatcaaataaaacgaaaggctcagtcgaaagactgggcctttcgcccgggctaattagggggtgtcgcccttattcgactctatagtgaagttcctattctctagt

SEQ ID NO: 122 - DNA, 669 bp, Nocardia sp.
  CDS (1)..(669)
atgattgaaaccatcttaccagccggcgtcgaatcagcagagttacttgagtaccctgaagatctgaaggcgcatccggctgaagagcatctgatcgcaaagagcgtagagaagcgtcgtcgcgacttcattggcgcacgtcattgcgcccgtctggcactggcggagctgggtgaaccgccggttgcgattggcaagggtgaacgtggtgcgccgatttggccgcgtggtgtcgtgggctctctgacccattgcgatggctatcgcgcagcggcggttgctcacaaaatgcgttttcgcagcatcggcatcgacgccgaaccgcacgcgaccctgccggaaggtgtcctggattcggttagcctgccgcctgagcgtgagtggctgaaaaccaccgacagcgcactgcacctggaccgtttgctgttttgtgcgaaagaagcaacttacaaagcgtggtggccgctgacggcacgttggctgggtttcgaagaagcgcacattaccttcgaaatcgaggatggtagcgccgactctggtaatggcacgtttcacagcgaactgctggtgccgggtcagaccaatgacggtggtaccccgctgctgtctttcgacggtcgctggctgatcgctgatggcttcatcctgacggcgattgcatacgcatga

SEQ ID NO: 123 - protein, 222 aa, Nocardia sp.
MIETILPAGVESAELLEYPEDLKAHPAEEHLIAKSVEKRRRDFIGARHCARLALAELGEPPVAIGKGERGAPIWPRGVVGSLTHCDGYRAAAVAHKMRFRSIGIDAEPHATLPEGVLDSVSLPPEREWLKTTDSALHLDRLLFCAKEATYKAWWPLTARWLGFEEAHITFEIEDGSADSGNGTFHSELLVPGQTNDGGTPLLSFDGRWLIADGFILTAIAYA

SEQ ID NO: 124 - DNA, 9295 bp, Artificial Sequence
  vector
ggggaattgtgagcggataacaattcccctgtagaaataattttgtttaactttaataaggagatataccatgggcagcagccatcaccatcatcaccacagccaggatccttcaatattattgaagcatttatcagggttattgtctcatgagcggatacatatttgaatgtatttagaaaaataaacaaataggggtcagtgttacaaccaattaaccaattctgaacattatcgcgagcccatttatacctgaatatggctcataacaccccttgtttgcctggcggcagtagcgcggtggtcccacctgaccccatgccgaactcagaagtgaaacgccgtagcgccgatggtagtgtggggactccccatgcgagagtagggaactgccaggcatcaaataaaacgaaaggctcagtcgaaagactgggcctttcgcccgggctaattatggggtgtcgcccttattcgactctatagtgaagttcctattctctagaaagtataggaacttctgaagtggggatccggccggcctgcagccccgcagggcctgtctcggtcgatcattcagcccggctcatagatatgcgggcagtgagcgcaacgcaattaatgtaagttagctcactcattaggcaccccaggcttgacactttatgcttccggctcgtataatgtgtggaattgtgagcggataacaataacaatttcacacaggatctaggaaccaaggagagtggcatgtgagtttttctaattataaagtaatcgcgatgccggtgttggttgctaattttgttttgggggcggccactgcatgggcgaatgaaaattatccggcgaaatctgctggctataatcagggtgactgggtcgctagcttcaatttttctaaggtctatgtgggtgaggagcttggcgatctaaatgttggagggggggctttgccaaatgctgatgtaagtattggtaatgatacaacacttacgtttgatatcgcctattttgttagctcaaatatagcggtggatttttttgttggggtgccagctagggctaaatttcaaggtgagaaatcaatctcctcgctgggaagagtcagtgaagttgattacggccctgcaattctttcgcttcaatatcattacgatagctttgagcgactttatccatatgttggggttggtgttggtcgggtgctattttttgataaaaccgacggtgctttgagttcgtttgatattaaggataaatgggcgcctgcttttcaggttggccttagatatgaccttggtaactcatggatgctaaattcagatgtgcgttatattcctttcaaaacggacgtcacaggtactcttggcccggttcctgtttctactaaaattgaggttgatcctttcattctcagtcttggtgcgtcatatgttttctaaggtaccctcgagtctggtaaagaaaccgctgctgcgaaatttgaacgccagcacatggactcgtctactagcgcagcttaattaacctaggctgctgccaccgctgagcaataactagcataaccccttggggcctctaaacgggtcttgaggggttttttgctgaaacctcaggcatttgagaagcacacggtcacactgcttccggtagtcaataaaatcgcacctggtgtttaaacggccggcccctgcaggggcagtgagcgcaacgcaattaatgtaagttagctcactcattaggcaccccaggcttgacactttatgcttccggctcgtataatgtgtggaattgtgagcggataacaataacaatttcacacaggatctaggaaccaaggagagtggcatatgacaattgaaacgcgcgaagatagatttaacagacgtattgatcacctttttgaaacagacccgcagttcgcagcggcacgtccggacgaagctattagcgctgcagcagccgatccggagctgcgcctgccagccgcagtcaagcagattctggccggttatgcggaccgtccggccctgggtaagcgtgctgtggagttcgttacggacgaagaaggccgtaccaccgcaaagttgctgccgcgtttcgatacgatcacctaccgtcaattggcaggtcgtattcaggcggtgactaacgcgtggcacaatcacccggtgaatgcgggtgaccgtgtcgcaattttgggcttcacgagcgttgactatacgaccatcgatatcgcactgctggaactgggtgctgttagcgttccgttgcaaacgtctgctccggttgcgcagctgcaaccgattgtggccgaaaccgagccgaaggtcattgcgagcagcgtcgatttcctggcagatgcggtcgcactggttgagagcggtccagccccgagccgtctggtcgtttttgattatagccacgaggtcgacgatcagcgtgaggccttcgaagcggccaagggtaaactggcgggtaccggtgttgtggtggaaacgattacggatgtcttggatcgcggtcgcagcctggctgatgcgccgctgtatgtcccagacgaaacggacccgctgaccctgctgatctataccagcggtagcaccggtacgccgaagggtgctatgtatccggaatccaagaccgcgacgatgtggcaagctggtagcaaggcgcgttgggatgaaaccctgggcgttatgccgagcatcaccctgaacttcatgccaatgtcccacgtgatgggtcgcggcatcctgtgtagcaccctggcgagcggcggtactgcgtattttgccgcacgtagcgacttgtctacctttctggaggacctggcgttggtccgcccgacccaactgaatttcgtccctcgcatctgggatatgctgttccaagagtatcagagccgtctggacaatcgtcgtgccgagggtagcgaggatcgcgcggaagcggccgtactggaagaggttcgtacccaattgctgggcggtcgtttcgtttccgctctgaccggtagcgctccaatcagcgcggaaatgaaaagctgggtcgaggacctgctggacatgcatttgctggaaggttacggttccaccgaggcgggtgccgtgttcattgacggtcaaatccaacgtccacctgttatcgattacaaactggttgatgttccggacttgggttactttgcgaccgatcgtccataccctcgcggcgagctgctggtgaagagcgagcagatgttcccgggctactataagcgtccggagattacggcggagatgtttgacgaggacggttattaccgtaccggcgacatcgtggccgaactgggtccggatcatctggagtatctggaccgccgtaacaacgtcctgaagctgagccagggtgagtttgttaccgtttccaaactggaagcggtctttggcgatagcccactggtgcgccagatttatgtctacggtaactctgcacgcagctatctgctggcggttgtcgttccgaccgaagaggcactgagccgctgggacggcgatgaactgaagagccgcatcagcgacagcttgcaagatgcggcacgtgccgcaggtttgcaaagctatgagatcccgcgtgactttctggttgaaaccacgccgttcacgttggagaacggtctgctgaccggcattcgcaaactggcgcgtccgaagctgaaagcgcattatggcgaacgtctggaacaactgtacacggatctggctgaaggccaagccaatgagctgcgtgaactgcgccgtaatggtgcggatcgtccggttgttgaaacggtttcgcgtgccgcggtcgccttgctgggtgcgtctgtgacggacctgcgttctgacgcccactttacggacctgggcggtgattccctgagcgccctgagcttcagcaacctgctgcacgagatttttgacgtcgatgtcccggtgggcgtgattgtcagcccggcaaccgacctggccggtgttgccgcctatattgagggtgagctgcgtggtagcaaacgtccgacctacgcaagcgtccacggtcgtgacgcaaccgaggtgcgtgctcgcgatctggcgctgggcaaattcatcgacgcaaaaacgctgagcgcagcaccgggtctgccgcgctccggtacggagatccgtacggtgctgctgacgggtgcgaccggttttctgggtcgctacttggccttggagtggctggaacgtatggacctggttgacggcaaggtgatctgtttggttcgtgcgcgtagcgacgacgaagcacgtgcgcgtctggacgcaaccttcgataccggcgatgctaccttgctggagcactaccgtgccctggcggctgaccatctggaagttattgcgggtgataagggtgaagccgacttgggcctggatcacgatacctggcagcgtctggcagatacggtcgacctgatcgttgacccggctgcgctggttaaccacgttttgccgtacagccagatgttcggcccaaacgctctgggcactgcagagctgattcgcattgcactgaccaccaccattaaaccgtacgtctacgtgagcaccattggtgttggtcagggcatcagcccagaagcctttgttgaagatgcggacatccgcgaaatcagcgccacgcgtcgcgttgacgacagctacgcgaatggttatggtaacagcaaatgggcaggtgaggttctgctgcgcgaagcgcacgactggtgcggcctgccggtgagcgtgtttcgttgtgacatgatcttggccgacaccacctactccggccagctgaatctgccggatatgttcacccgtctgatgttgagcctggtggcaactggcatcgcaccgggcagcttttatgagctggacgcggacggtaatcgtcaacgtgcacattatgatggtctgccggtggagtttatcgcggaagcaatcagcacgatcggctctcaagtgactgacggtttcgaaacgttccatgtcatgaatccttatgatgatggtatcggcctggacgagtacgtcgactggctgattgaggctggctacccggttcaccgtgttgatgattatgcgacgtggttgagccgttttgaaaccgccttgcgtgcgctgccggagcgtcaacgtcaggcatccctgctgccgctgttgcacaactaccagcagccttctccgccggtttgcggtgctatggctcctaccgaccgtttccgtgcagctgtccaggacgccaaaattggcccagataaagacatcccacatgtaacggcggacgtgatcgtgaaatacattagcaacttgcagatgctgggtctgctgtaagtctaagagaaggagttctatcgtctatgattgaaaccatcttaccagccggcgtcgaatcagcagagttacttgagtaccctgaagatctgaaggcgcatccggctgaagagcatctgatcgcaaagagcgtagagaagcgtcgtcgcgacttcattggcgcacgtcattgcgcccgtctggcactggcggagctgggtgaaccgccggttgcgattggcaagggtgaacgtggtgcgccgatttggccgcgtggtgtcgtgggctctctgacccattgcgatggctatcgcgcagcggcggttgctcacaaaatgcgttttcgcagcatcggcatcgacgccgaaccgcacgcgaccctgccggaaggtgtcctggattcggttagcctgccgcctgagcgtgagtggctgaaaaccaccgacagcgcactgcacctggaccgtttgctgttttgtgcgaaagaagcaacttacaaagcgtggtggccgctgacggcacgttggctgggtttcgaagaagcgcacattaccttcgaaatcgaggatggtagcgccgactctggtaatggcacgtttcacagcgaactgctggtgccgggtcagaccaatgacggtggtaccccgctgctgtctttcgacggtcgctggctgatcgctgatggcttcatcctgacggcgattgcatacgcatgataatgataacctaggtaaaccagcaatagatataaaccagcaatagacataagcggctatttaacgaccctgccctgaaccgacgaccgggtcatcgtggccggatcttgcggcccctcggcttgaacgaattgttagacattatttgccgactaccttggtgatctcgcctttcacgtagtggacaaattcttccaactgatctgcgcgcgaggccaagcgatcttcttcttgtccaagataagcctgtctagcttcaagtatgacgggctgatactgggccggcaggcgctccattgcccagtcggcagcgacatccttcggcgcgattttgccggttactgcgctgtaccaaatgcgggacaacgtaagcactacatttcgctcatcgccagcccagtcgggcggcgagttccatagcgttaaggtttcatttagcgcctcaaatagatcctgttcaggaaccggatcaaagagttcctccgccgctggacctaccaaggcaacgctatgttctcttgcttttgtcagcaagatagccagatcaatgtcgatcgtggctggctcgaagatacctgcaagaatgtcattgcgctgccattctccaaattgcagttcgcgcttagctggataacgccacggaatgatgtcgtcgtgcacaacaatggtgacttctacagcgcggagaatctcgctctctccaggggaagccgaagtttccaaaaggtcgttgatcaaagctcgccgcgttgtttcatcaagccttacggtcaccgtaaccagcaaatcaatatcactgtgtggcttcaggccgccatccactgcggagccgtacaaatgtacggccagcaacgtcggttcgagatggcgctcgatgacgccaactacctctgatagttgagtcgatacttcggcgatcaccgcttccctcatactcttcctttttcaatattattgaagcatttatcagggttattgtctcatgagcggatacatatttgaatgtatttagaaaaataaacaaatagctagctcactcggtcgctacgctccgggcgtgagactgcggcgggcgctgcggacacatacaaagttacccacagattccgtggataagcaggggactaacatgtgaggcaaaacagcagggccgcgccggtggcgtttttccataggctccgccctcctgccagagttcacataaacagacgcttttccggtgcatctgtgggagccgtgaggctcaaccatgaatctgacagtacgggcgaaacccgacaggacttaaagatccccaccgtttccggcgggtcgctccctcttgcgctctcctgttccgaccctgccgtttaccggatacctgttccgcctttctcccttacgggaagtgtggcgctttctcatagctcacacactggtatctcggctcggtgtaggtcgttcgctccaagctgggctgtaagcaagaactccccgttcagcccgactgctgcgccttatccggtaactgttcacttgagtccaacccggaaaagcacggtaaaacgccactggcagcagccattggtaactgggagttcgcagaggatttgtttagctaaacacgcggttgctcttgaagtgtgcgccaaagtccggctacactggaaggacagatttggttgctgtgctctgcgaaagccagttaccacggttaagcagttccccaactgacttaaccttcgatcaaaccacctccccaggtggttttttcgtttacagggcaaaagattacgcgcagaaaaaaaggatctcaagaagatcctttgatcttttctactgaaccgctctagatttcagtgcaatttatctcttcaaatgtagcacctgaagtcagccccatacgatataagttgtaattctcatgttagtcatgccccgcgcccaccggaaggagctgactgggttgaaggctctcaagggcatcggtcgagatcccggtgcctaatgagtgagctaacttacattaattgcgttgcgctcactgcccgctttccagtcgggaaacctgtcgtgccagctgcattaatgaatcggccaacgcgcggggagaggcggtttgcgtattgggcgccagggtggtttttcttttcaccagtgagacgggcaacagctgattgcccttcaccgcctggccctgagagagttgcagcaagcggtccacgctggtttgccccagcaggcgaaaatcctgtttgatggtggttaacggcgggatataacatgagctgtcttcggtatcgtcgtatcccactaccgagatgtccgcaccaacgcgcagcccggactcggtaatggcgcgcattgcgcccagcgccatctgatcgttggcaaccagcatcgcagtgggaacgatgccctcattcagcatttgcatggtttgttgaaaaccggacatggcactccagtcgccttcccgttccgctatcggctgaatttgattgcgagtgagatatttatgccagccagccagacgcagacgcgccgagacagaacttaatgggcccgctaacagcgcgatttgctggtgacccaatgcgaccagatgctccacgcccagtcgcgtaccgtcttcatgggagaaaataatactgttgatgggtgtctggtcagagacatcaagaaataacgccggaacattagtgcaggcagcttccacagcaatggcatcctggtcatccagcggatagttaatgatcagcccactgacgcgttgcgcgagaagattgtgcaccgccgctttacaggcttcgacgccgcttcgttctaccatcgacaccaccacgctggcacccagttgatcggcgcgagatttaatcgccgcgacaatttgcgacggcgcgtgcagggccagactggaggtggcaacgccaatcagcaacgactgtttgcccgccagttgttgtgccacgcggttgggaatgtaattcagctccgccatcgccgcttccactttttcccgcgttttcgcagaaacgtggctggcctggttcaccacgcgggaaacggtctgataagagacaccggcatactctgcgacatcgtataacgttactggtttcacattcaccaccctgaattgactctcttccgggcgctatcatgccataccgcgaaaggttttgcgccattcgatggtgtccgggatctcgacgctctcccttatgcgactcctgcattaggaaattaatacgactcactata

SEQ ID NO: 125 - DNA, 8200 bp, Artificial Sequence
  vector
ggggaattgtgagcggataacaattcccctgtagaaataattttgtttaactttaataaggagatataccatgggcagcagccatcaccatcatcaccacagccaggatccgaattcgagctcggcgcgcctgcaggtcgacaagcttgcggccgcataatgcttaagtcgaacagaaagtaatcgtattgtacacggccgcataatcgaaattaatacgactcactataggggaattgtgagcggataacaattccccatcttagtatattagttaagtataagaaggagatatacatatggcagatctcaattggatatcggccggccacgcgatcgctgacgtcggtaccctcgagtctggtaaagaaaccgctgctgcgaaatttgaacgccagcacatggactcgtctactagcgcagcttaattaacctaggctgctgccaccgctgagcaataactagcataaccccttggggcctctaaacgggtcttgaggggttttttgctgaaacctcaggcatttgagaagcacacggtcacactgcttccggtagtcaataaaatcgcacctggtgtttaaacggccggcccctgcaggggcagtgagcgcaacgcaattaatgtaagttagctcactcattaggcaccccaggcttgacactttatgcttccggctcgtataatgtgtggaattgtgagcggataacaataacaatttcacacaggatctaggaaccaaggagagtggcatatgacaattgaaacgcgcgaagatagatttaacagacgtattgatcacctttttgaaacagacccgcagttcgcagcggcacgtccggacgaagctattagcgctgcagcagccgatccggagctgcgcctgccagccgcagtcaagcagattctggccggttatgcggaccgtccggccctgggtaagcgtgctgtggagttcgttacggacgaagaaggccgtaccaccgcaaagttgctgccgcgtttcgatacgatcacctaccgtcaattggcaggtcgtattcaggcggtgactaacgcgtggcacaatcacccggtgaatgcgggtgaccgtgtcgcaattttgggcttcacgagcgttgactatacgaccatcgatatcgcactgctggaactgggtgctgttagcgttccgttgcaaacgtctgctccggttgcgcagctgcaaccgattgtggccgaaaccgagccgaaggtcattgcgagcagcgtcgatttcctggcagatgcggtcgcactggttgagagcggtccagccccgagccgtctggtcgtttttgattatagccacgaggtcgacgatcagcgtgaggccttcgaagcggccaagggtaaactggcgggtaccggtgttgtggtggaaacgattacggatgtcttggatcgcggtcgcagcctggctgatgcgccgctgtatgtcccagacgaaacggacccgctgaccctgctgatctataccagcggtagcaccggtacgccgaagggtgctatgtatccggaatccaagaccgcgacgatgtggcaagctggtagcaaggcgcgttgggatgaaaccctgggcgttatgccgagcatcaccctgaacttcatgccaatgtcccacgtgatgggtcgcggcatcctgtgtagcaccctggcgagcggcggtactgcgtattttgccgcacgtagcgacttgtctacctttctggaggacctggcgttggtccgcccgacccaactgaatttcgtccctcgcatctgggatatgctgttccaagagtatcagagccgtctggacaatcgtcgtgccgagggtagcgaggatcgcgcggaagcggccgtactggaagaggttcgtacccaattgctgggcggtcgtttcgtttccgctctgaccggtagcgctccaatcagcgcggaaatgaaaagctgggtcgaggacctgctggacatgcatttgctggaaggttacggttccaccgaggcgggtgccgtgttcattgacggtcaaatccaacgtccacctgttatcgattacaaactggttgatgttccggacttgggttactttgcgaccgatcgtccataccctcgcggcgagctgctggtgaagagcgagcagatgttcccgggctactataagcgtccggagattacggcggagatgtttgacgaggacggttattaccgtaccggcgacatcgtggccgaactgggtccggatcatctggagtatctggaccgccgtaacaacgtcctgaagctgagccagggtgagtttgttaccgtttccaaactggaagcggtctttggcgatagcccactggtgcgccagatttatgtctacggtaactctgcacgcagctatctgctggcggttgtcgttccgaccgaagaggcactgagccgctgggacggcgatgaactgaagagccgcatcagcgacagcttgcaagatgcggcacgtgccgcaggtttgcaaagctatgagatcccgcgtgactttctggttgaaaccacgccgttcacgttggagaacggtctgctgaccggcattcgcaaactggcgcgtccgaagctgaaagcgcattatggcgaacgtctggaacaactgtacacggatctggctgaaggccaagccaatgagctgcgtgaactgcgccgtaatggtgcggatcgtccggttgttgaaacggtttcgcgtgccgcggtcgccttgctgggtgcgtctgtgacggacctgcgttctgacgcccactttacggacctgggcggtgattccctgagcgccctgagcttcagcaacctgctgcacgagatttttgacgtcgatgtcccggtgggcgtgattgtcagcccggcaaccgacctggccggtgttgccgcctatattgagggtgagctgcgtggtagcaaacgtccgacctacgcaagcgtccacggtcgtgacgcaaccgaggtgcgtgctcgcgatctggcgctgggcaaattcatcgacgcaaaaacgctgagcgcagcaccgggtctgccgcgctccggtacggagatccgtacggtgctgctgacgggtgcgaccggttttctgggtcgctacttggccttggagtggctggaacgtatggacctggttgacggcaaggtgatctgtttggttcgtgcgcgtagcgacgacgaagcacgtgcgcgtctggacgcaaccttcgataccggcgatgctaccttgctggagcactaccgtgccctggcggctgaccatctggaagttattgcgggtgataagggtgaagccgacttgggcctggatcacgatacctggcagcgtctggcagatacggtcgacctgatcgttgacccggctgcgctggttaaccacgttttgccgtacagccagatgttcggcccaaacgctctgggcactgcagagctgattcgcattgcactgaccaccaccattaaaccgtacgtctacgtgagcaccattggtgttggtcagggcatcagcccagaagcctttgttgaagatgcggacatccgcgaaatcagcgccacgcgtcgcgttgacgacagctacgcgaatggttatggtaacagcaaatgggcaggtgaggttctgctgcgcgaagcgcacgactggtgcggcctgccggtgagcgtgtttcgttgtgacatgatcttggccgacaccacctactccggccagctgaatctgccggatatgttcacccgtctgatgttgagcctggtggcaactggcatcgcaccgggcagcttttatgagctggacgcggacggtaatcgtcaacgtgcacattatgatggtctgccggtggagtttatcgcggaagcaatcagcacgatcggctctcaagtgactgacggtttcgaaacgttccatgtcatgaatccttatgatgatggtatcggcctggacgagtacgtcgactggctgattgaggctggctacccggttcaccgtgttgatgattatgcgacgtggttgagccgttttgaaaccgccttgcgtgcgctgccggagcgtcaacgtcaggcatccctgctgccgctgttgcacaactaccagcagccttctccgccggtttgcggtgctatggctcctaccgaccgtttccgtgcagctgtccaggacgccaaaattggcccagataaagacatcccacatgtaacggcggacgtgatcgtgaaatacattagcaacttgcagatgctgggtctgctgtaagtctaagagaaggagttctatcgtctatgattgaaaccatcttaccagccggcgtcgaatcagcagagttacttgagtaccctgaagatctgaaggcgcatccggctgaagagcatctgatcgcaaagagcgtagagaagcgtcgtcgcgacttcattggcgcacgtcattgcgcccgtctggcactggcggagctgggtgaaccgccggttgcgattggcaagggtgaacgtggtgcgccgatttggccgcgtggtgtcgtgggctctctgacccattgcgatggctatcgcgcagcggcggttgctcacaaaatgcgttttcgcagcatcggcatcgacgccgaaccgcacgcgaccctgccggaaggtgtcctggattcggttagcctgccgcctgagcgtgagtggctgaaaaccaccgacagcgcactgcacctggaccgtttgctgttttgtgcgaaagaagcaacttacaaagcgtggtggccgctgacggcacgttggctgggtttcgaagaagcgcacattaccttcgaaatcgaggatggtagcgccgactctggtaatggcacgtttcacagcgaactgctggtgccgggtcagaccaatgacggtggtaccccgctgctgtctttcgacggtcgctggctgatcgctgatggcttcatcctgacggcgattgcatacgcatgataatgataacctaggtaaaccagcaatagatataaaccagcaatagacataagcggctatttaacgaccctgccctgaaccgacgaccgggtcatcgtggccggatcttgcggcccctcggcttgaacgaattgttagacattatttgccgactaccttggtgatctcgcctttcacgtagtggacaaattcttccaactgatctgcgcgcgaggccaagcgatcttcttcttgtccaagataagcctgtctagcttcaagtatgacgggctgatactgggccggcaggcgctccattgcccagtcggcagcgacatccttcggcgcgattttgccggttactgcgctgtaccaaatgcgggacaacgtaagcactacatttcgctcatcgccagcccagtcgggcggcgagttccatagcgttaaggtttcatttagcgcctcaaatagatcctgttcaggaaccggatcaaagagttcctccgccgctggacctaccaaggcaacgctatgttctcttgcttttgtcagcaagatagccagatcaatgtcgatcgtggctggctcgaagatacctgcaagaatgtcattgcgctgccattctccaaattgcagttcgcgcttagctggataacgccacggaatgatgtcgtcgtgcacaacaatggtgacttctacagcgcggagaatctcgctctctccaggggaagccgaagtttccaaaaggtcgttgatcaaagctcgccgcgttgtttcatcaagccttacggtcaccgtaaccagcaaatcaatatcactgtgtggcttcaggccgccatccactgcggagccgtacaaatgtacggccagcaacgtcggttcgagatggcgctcgatgacgccaactacctctgatagttgagtcgatacttcggcgatcaccgcttccctcatactcttcctttttcaatattattgaagcatttatcagggttattgtctcatgagcggatacatatttgaatgtatttagaaaaataaacaaatagctagctcactcggtcgctacgctccgggcgtgagactgcggcgggcgctgcggacacatacaaagttacccacagattccgtggataagcaggggactaacatgtgaggcaaaacagcagggccgcgccggtggcgtttttccataggctccgccctcctgccagagttcacataaacagacgcttttccggtgcatctgtgggagccgtgaggctcaaccatgaatctgacagtacgggcgaaacccgacaggacttaaagatccccaccgtttccggcgggtcgctccctcttgcgctctcctgttccgaccctgccgtttaccggatacctgttccgcctttctcccttacgggaagtgtggcgctttctcatagctcacacactggtatctcggctcggtgtaggtcgttcgctccaagctgggctgtaagcaagaactccccgttcagcccgactgctgcgccttatccggtaactgttcacttgagtccaacccggaaaagcacggtaaaacgccactggcagcagccattggtaactgggagttcgcagaggatttgtttagctaaacacgcggttgctcttgaagtgtgcgccaaagtccggctacactggaaggacagatttggttgctgtgctctgcgaaagccagttaccacggttaagcagttccccaactgacttaaccttcgatcaaaccacctccccaggtggttttttcgtttacagggcaaaagattacgcgcagaaaaaaaggatctcaagaagatcctttgatcttttctactgaaccgctctagatttcagtgcaatttatctcttcaaatgtagcacctgaagtcagccccatacgatataagttgtaattctcatgttagtcatgccccgcgcccaccggaaggagctgactgggttgaaggctctcaagggcatcggtcgagatcccggtgcctaatgagtgagctaacttacattaattgcgttgcgctcactgcccgctttccagtcgggaaacctgtcgtgccagctgcattaatgaatcggccaacgcgcggggagaggcggtttgcgtattgggcgccagggtggtttttcttttcaccagtgagacgggcaacagctgattgcccttcaccgcctggccctgagagagttgcagcaagcggtccacgctggtttgccccagcaggcgaaaatcctgtttgatggtggttaacggcgggatataacatgagctgtcttcggtatcgtcgtatcccactaccgagatgtccgcaccaacgcgcagcccggactcggtaatggcgcgcattgcgcccagcgccatctgatcgttggcaaccagcatcgcagtgggaacgatgccctcattcagcatttgcatggtttgttgaaaaccggacatggcactccagtcgccttcccgttccgctatcggctgaatttgattgcgagtgagatatttatgccagccagccagacgcagacgcgccgagacagaacttaatgggcccgctaacagcgcgatttgctggtgacccaatgcgaccagatgctccacgcccagtcgcgtaccgtcttcatgggagaaaataatactgttgatgggtgtctggtcagagacatcaagaaataacgccggaacattagtgcaggcagcttccacagcaatggcatcctggtcatccagcggatagttaatgatcagcccactgacgcgttgcgcgagaagattgtgcaccgccgctttacaggcttcgacgccgcttcgttctaccatcgacaccaccacgctggcacccagttgatcggcgcgagatttaatcgccgcgacaatttgcgacggcgcgtgcagggccagactggaggtggcaacgccaatcagcaacgactgtttgcccgccagttgttgtgccacgcggttgggaatgtaattcagctccgccatcgccgcttccactttttcccgcgttttcgcagaaacgtggctggcctggttcaccacgcgggaaacggtctgataagagacaccggcatactctgcgacatcgtataacgttactggtttcacattcaccaccctgaattgactctcttccgggcgctatcatgccataccgcgaaaggttttgcgccattcgatggtgtccgggatctcgacgctctcccttatgcgactcctgcattaggaaattaatacgactcactata

SEQ ID NO: 126 - DNA, 36 bp, Artificial Sequence
  primer
ccggtagtcaataaaatcgcacctggtgtttaaacg

SEQ ID NO: 127 - DNA, 26 bp, Artificial Sequence
  primer
tgtcatatgccactctccttggttcc

SEQ ID NO: 128 - DNA, 31 bp, Artificial Sequence
  primer
gagtggcatatgacaattgaaacgcgcgaag

SEQ ID NO: 129 - DNA, 36 bp, Artificial Sequence
  primer
tctattgctggtttacctaggttatcattatcatgc

SEQ ID NO: 130 - DNA, 1137 bp, Bacillus subtilis
  CDS (1)..(1137)
atgatcataggggttcctaaagagataaaaaacaatgaaaaccgtgtcgcattaacacccgggggcgtttctcagctcatttcaaacggccaccgggtgctggttgaaacaggcgcgggccttggaagcggatttgaaaatgaagcctatgagtcagcaggagcggaaatcattgctgatccgaagcaggtctgggacgccgaaatggtcatgaaagtaaaagaaccgctgccggaagaatatgtttattttcgcaaaggacttgtgctgtttacgtaccttcatttagcagctgagcctgagcttgcacaggccttgaaggataaaggagtaactgccatcgcatatgaaacggtcagtgaaggccggacattgcctcttctgacgccaatgtcagaggttgcgggcagaatggcagcgcaaatcggcgctcaattcttagaaaagcctaaaggcggaaaaggcattctgcttgccggggtgcctggcgtttcccgcggaaaagtaacaattatcggaggaggcgttgtcgggacaaacgcggcgaaaatggctgtcggcctcggtgcagatgtgacgatcattgacttaaacgcagaccgcttgcgccagcttgatgacatcttcggccatcagattaaaacgttaatttctaatccggtcaatattgctgatgctgtggcggaagcggatctcctcatttgcgcggtattaattccgggtgctaaagctccgactcttgtcactgaggaaatggtaaaacaaatgaaacccggttcagttattgttgatgtagcgatcgaccaaggcggcatcgtcgaaactgtcgaccatatcacaacacatgatcagccaacatatgaaaaacacggggttgtgcattatgctgtagcgaacatgccaggcgcagtccctcgtacatcaacaatcgccctgactaacgttactgttccatacgcgctgcaaatcgcgaacaaaggggcagtaaaagcgctcgcagacaatacggcactgagagcgggtttaaacaccgcaaacggacacgtgacctatgaagctgtagcaagagatctaggctatgagtatgttcctgccgagaaagctttacaggatgaatcatctgtggcgggtgcttaa

SEQ ID NO: 131 - protein, 378 aa, Bacillus subtilis
MIIGVPKEIKNNENRVALTPGGVSQLISNGHRVLVETGAGLGSGFENEAYESAGAEIIADPKQVWDAEMVMKVKEPLPEEYVYFRKGLVLFTYLHLAAEPELAQALKDKGVTAIAYETVSEGRTLPLLTPMSEVAGRMAAQIGAQFLEKPKGGKGILLAGVPGVSRGKVTIIGGGVVGTNAAKMAVGLGADVTIIDLNADRLRQLDDIFGHQIKTLISNPVNIADAVAEADLLICAVLIPGAKAPTLVTEEMVKQMKPGSVIVDVAIDQGGIVETVDHITTHDQPTYEKHGVVHYAVANMPGAVPRTSTIALTNVTVPYALQIANKGAVKALADNTALRAGLNTANGHVTYEAVARDLGYEYVPAEKALQDESSVAGA

SEQ ID NO: 132 - DNA, 1380 bp, Chromobacterium violaceum
  CDS (1)..(1380)
atgcagaaacagcgtaccacctctcagtggcgtgaactcgatgcggcgcatcatctccatccgtttaccgataccgcgagcctcaatcaggcgggtgcgcgtgtgatgacccgtggcgaaggcgtgtatctctgggatagcgaaggcaacaaaattattgatggcatggcgggcctctggtgcgtgaacgtgggctatggccgtaaagattttgcggaagcggcgcgtcgtcagatggaagaactcccgttttataacaccttctttaaaaccacccatccggcggtggtggaactcagcagcctcctcgccgaagttaccccggcaggttttgatcgtgtgttttataccaacagcggcagcgaaagcgtggataccatgattcgtatggtgcgtcgttattgggatgtgcagggcaaaccggaaaaaaaaaccctcattggccgttggaacggctatcacggcagcaccattggcggtgcgagcctcggcggcatgaaatatatgcatgaacagggcgatctcccgattccgggcatggcgcatattgaacagccgtggtggtataaacatggcaaagatatgaccccggatgaatttggcgtggttgcggcgcgttggctcgaagaaaaaattctcgaaatcggcgcggataaagtggcggcgtttgtgggcgaaccgattcagggtgcgggcggtgtgattgttccgccggcaacctattggccggaaattgaacgtatttgccgcaaatatgatgtgctcctcgttgcggatgaagtgatttgcggctttggccgtaccggcgaatggtttggccatcagcattttggctttcagccggacctctttaccgcggcgaaaggcctcagcagcggctatctcccgattggcgcggtgtttgtgggcaaacgtgttgcggaaggtctcattgcgggcggtgattttaaccatggctttacctatagcggccatccggtgtgtgcggcggtggcgcatgcgaatgttgcggcgctccgtgatgaaggcattgtgcagcgtgtgaaagatgatattggcccgtatatgcagaaacgttggcgtgaaacctttagccgttttgaacatgtggatgatgtgcgtggcgtgggcatggtgcaggcgtttaccctcgtgaaaaacaaagcgaaacgtgaactctttccggattttggcgaaattggcaccctctgccgcgatattttttttcgcaacaacctcattatgcgtgcgtgcggcgatcacattgtgtctgcaccgccgctcgttatgacccgtgcggaagtggatgaaatgctcgccgtggcggaacgttgcctcgaagaatttgaacagaccctcaaagcgcgtggcctcgcctaa

SEQ ID NO: 133 - protein, 459 aa, Chromobacterium violaceum
MQKQRTTSQWRELDAAHHLHPFTDTASLNQAGARVMTRGEGVYLWDSEGNKIIDGMAGLWCVNVGYGRKDFAEAARRQMEELPFYNTFFKTTHPAVVELSSLLAEVTPAGFDRVFYTNSGSESVDTMIRMVRRYWDVQGKPEKKTLIGRWNGYHGSTIGGASLGGMKYMHEQGDLPIPGMAHIEQPWWYKHGKDMTPDEFGVVAARWLEEKILEIGADKVAAFVGEPIQGAGGVIVPPATYWPEIERICRKYDVLLVADEVICGFGRTGEWFGHQHFGFQPDLFTAAKGLSSGYLPIGAVFVGKRVAEGLIAGGDFNHGFTYSGHPVCAAVAHANVAALRDEGIVQRVKDDIGPYMQKRWRETFSRFEHVDDVRGVGMVQAFTLVKNKAKRELFPDFGEIGTLCRDIFFRNNLIMRACGDHIVSAPPLVMTRAEVDEMLAVAERCLEEFEQTLKARGLA

SEQ ID NO: 134 - DNA, 7966 bp, Artificial Sequence
  vector
ctagattattaggcgaggccacgcgctttgagggtctgttcaaattcttcgaggcaacgttccgccacggcgagcatttcatccacttccgcacgggtcataacgagcggcggtgcagacacaatgtgatcgccgcacgcacgcataatgaggttgttgcgaaaaaaaatatcgcggcagagggtgccaatttcgccaaaatccggaaagagttcacgtttcgctttgtttttcacgagggtaaacgcctgcaccatgcccacgccacgcacatcatccacatgttcaaaacggctaaaggtttcacgccaacgtttctgcatatacgggccaatatcatctttcacacgctgcacaatgccttcatcacggagcgccgcaacattcgcatgcgccaccgccgcacacaccggatggccgctataggtaaagccatggttaaaatcaccgcccgcaatgagaccttccgcaacacgtttgcccacaaacaccgcgccaatcgggagatagccgctgctgaggcctttcgccgcggtaaagaggtccggctgaaagccaaaatgctgatggccaaaccattcgccggtacggccaaagccgcaaatcacttcatccgcaacgaggagcacatcatatttgcggcaaatacgttcaatttccggccaataggttgccggcggaacaatcacaccgcccgcaccctgaatcggttcgcccacaaacgccgccactttatccgcgccgatttcgagaattttttcttcgagccaacgcgccgcaaccacgccaaattcatccggggtcatatctttgccatgtttataccaccacggctgttcaatatgcgccatgcccggaatcgggagatcgccctgttcatgcatatatttcatgccgccgaggctcgcaccgccaatggtgctgccgtgatagccgttccaacggccaatgagggtttttttttccggtttgccctgcacatcccaataacgacgcaccatacgaatcatggtatccacgctttcgctgccgctgttggtataaaacacacgatcaaaacctgccggggtaacttcggcgaggaggctgctgagttccaccaccgccggatgggtggttttaaagaaggtgttataaaacgggagttcttccatctgacgacgcgccgcttccgcaaaatctttacggccatagcccacgttcacgcaccagaggcccgccatgccatcaataattttgttgccttcgctatcccagagatacacgccttcgccacgggtcatcacacgcgcacccgcctgattgaggctcgcggtatcggtaaacggatggagatgatgcgccgcatcgagttcacgccactgagaggtggtacgctgtttctgcatattatatctccttaaagctttaagcacccgccacagatgattcatcctgtaaagctttctcggcaggaacatactcatagcctagatctcttgctacagcttcataggtcacgtgtccgtttgcggtgtttaaacccgctctcagtgccgtattgtctgcgagcgcttttactgcccctttgttcgcgatttgcagcgcgtatggaacagtaacgttagtcagggcgattgttgatgtacgagggactgcgcctggcatgttcgctacagcataatgcacaaccccgtgtttttcatatgttggctgatcatgtgttgtgatatggtcgacagtttcgacgatgccgccttggtcgatcgctacatcaacaataactgaaccgggtttcatttgttttaccatttcctcagtgacaagagtcggagctttagcacccggaattaataccgcgcaaatgaggagatccgcttccgccacagcatcagcaatattgaccggattagaaattaacgttttaatctgatggccgaagatgtcatcaagctggcgcaagcggtctgcgtttaagtcaatgatcgtcacatctgcaccgaggccgacagccattttcgccgcgtttgtcccgacaacgcctcctccgataattgttacttttccgcgggaaacgccaggcaccccggcaagcagaatgccttttccgcctttaggcttttctaagaattgagcgccgatttgcgctgccattctgcccgcaacctctgacattggcgtcagaagaggcaatgtccggccttcactgaccgtttcatatgcgatggcagttactcctttatccttcaaggcctgtgcaagctcaggctcagctgctaaatgaaggtacgtaaacagcacaagtcctttgcgaaaataaacatattcttccggcagcggttcttttactttcatgaccatttcggcgtcccagacctgcttcggatcagcaatgatttccgctcctgctgactcataggcttcattttcaaatccgcttccaaggcccgcgcctgtttcaaccagcacccggtggccgtttgaaatgagctgagaaacgcccccgggtgttaatgcgacacggttttcattgttttttatctctttaggaacccctatgatcattatgccactctccttggttcctagatcctgtgtgaaattgttattgttatccgctcacaattccacacattatacgagccggaagcataaagtgtcaagcctggggtgcctaatgagtgagctaacttacattaattgcgttgcgctcactgcccgcatatctatgagccgggctgaatgatcgaccgagacaggccctgcggggctgcaggatccaattgtgagcggataacaattacgagcttcatgcacagtgatcgacgctgttgacaattaatcatcggctcgtataatgtgtggatgtggaattgtgagcgctcacaattccacaacggtttccctctagaaataattttgtttaacaggaggtaaaacatatgctggactggaaaccgaaacgccctgacatgctggtagaccctttcggtctgggtagcatcgttcaagatggcctggtttttcgtcagaatttcagcattcgcagctatgagattggcgcggaccgtaccgcgagcatcgaaacggtcatgaaccatctgcaagaaaccgccttgaatcacgtgaagattgcgggcctgagcaacgacggttttggtcgcacgccggaaatgtacaagcgcgatctgatttgggttgtcgctaagatgcaggtgatggtcaaccgttacccgacgtggggcgacacggttgaagttaacacgtgggtggccaaatcgggcaagaatggtatgcgtcgtgactggctgattagcgactgcaacaccggcgagatcctgacccgtgcatcctccgtctgggtgatgatgaatcagaaaactcgccgcctgtccaaaattccggatgaagttcgcaatgagatcgagccgcatttcgtggacagcccaccggtcatcgaggatgatgaccgtaaactgccgaagctggatgaaaagaccgcggactctattcgcaaaggtctgacgccgcgttggaacgatctggatgttaaccagcacgttaacaatgtgaagtatatcggttggattttggaaagcaccccaccggaagttctggaaacccaagagctgtgcagcctgaccttggagtaccgtcgtgagtgtggccgtgagagcgtcctggagagcctgaccgcaatggacccgagcggtggtggttacggtagccagtttcaacacttgctgcgtctggaggatggtggcgagatcgtcaagggccgtaccgagtggcgtccgaaaaatggtgtgatcaatggcgtggtgccgactggtgaaagctctccgggtgattatagctaatagtcaaaagcctccggtcggaggcttttgactttctgcttactgaatttgcggccgcctcgagaaaatgaagggaagttcctatacttactagagaataggaacttctatagggagtcgaataagggcgacacaaaaggtattctaaatgcataataaatactgataacatcttatagtttgtattatattttgtattatcgttgacatgtataattttgatatcaaaaactgattttccctttattattttcgagatttattttcttaattctctttaacaaactagaaatattgtatatacaaaaaatcataaataatagatgaatagtttaattataggtgttcatcaatcgaaaaagcaacgtatcttatttaaagtgcgttgcttttttctcatttataaggttaaataattctcatatatcaagcaaagtgacaggcgcccttaaatattctgacaaatgctctttccctaaactccccccataaaaaaacccgccgaagcgggtttttacgttatttgcggattaacgattactcgttatcagaaccgcccaggatgcctggcagttccctactctcgccgctgcgctcggtcgttcggctgcgggacctcagcgctagcggagtgtatactggcttactatgttggcactgatgagggtgtcagtgaagtgcttcatgtggcaggagaaaaaaggctgcaccggtgcgtcagcagaatatgtgatacaggatatattccgcttcctcgctcactgactcgctacgctcggtcgttcgactgcggcgagcggaaatggcttacgaacggggcggagatttcctggaagatgccaggaagatacttaacagggaagtgagagggccgcggcaaagccgtttttccataggctccgcccccctgacaagcatcacgaaatctgacgctcaaatcagtggtggcgaaacccgacaggactataaagataccaggcgtttccccctggcggctccctcgtgcgctctcctgttcctgcctttcggtttaccggtgtcattccgctgttatggccgcgtttgtctcattccacgcctgacactcagttccgggtaggcagttcgctccaagctggactgtatgcacgaaccccccgttcagtccgaccgctgcgccttatccggtaactatcgtcttgagtccaacccggaaagacatgcaaaagcaccactggcagcagccactggtaattgatttagaggagttagtcttgaagtcatgcgccggttaaggctaaactgaaaggacaagttttggtgactgcgctcctccaagccagttacctcggttcaaagagttggtagctcagagaaccttcgaaaaaccgccctgcaaggcggttttttcgttttcagagcaagagattacgcgcagaccaaaacgatctcaagaagatcatcttattaatcactgcccgctttccagtcgggaaacctgtcgtgccagctgcattaatgaatcggccaacgcgcggggagaggcggtttgcgtattgggcgccagggtggtttttcttttcaccagtgagactggcaacagctgattgcccttcaccgcctggccctgagagagttgcagcaagcggtccacgctggtttgccccagcaggcgaaaatcctgtttgatggtggttaacggcgggatataacatgagctatcttcggtatcgtcgtatcccactaccgagatatccgcaccaacgcgcagcccggactcggtaatggcgcgcattgcgcccagcgccatctgatcgttggcaaccagcatcgcagtgggaacgatgccctcattcagcatttgcatggtttgttgaaaaccggacatggcactccagtcgccttcccgttccgctatcggctgaatttgattgcgagtgagatatttatgccagccagccagacgcagacgcgccgagacagaacttaatgggcccgctaacagcgcgatttgctggtgacccaatgcgaccagatgctccacgcccagtcgcgtaccgtcctcatgggagaaaataatactgttgatgggtgtctggtcagagacatcaagaaataacgccggaacattagtgcaggcagcttccacagcaatggcatcctggtcatccagcggatagttaatgatcagcccactgacgcgttgcgcgagaagattgtgcaccgccgctttacaggcttcgacgccgcttcgttctaccatcgacaccaccacgctggcacccagttgatcggcgcgagatttaatcgccgcgacaatttgcgacggcgcgtgcagggccagactggaggtggcaacgccaatcagcaacgactgtttgcccgccagttgttgtgccacgcggttgggaatgtaattcagctccgccatcgccgcttccactttttcccgcgttttcgcagaaacgtggctggcctggttcaccacgcgggaaacggtctgataagagacaccggcatactctgcgacatcgtataacgttactggtttcatattcaccaccctgaattgactctcttccgggcgctatcatgccataccgcgaaaggttttgcgccattcgatggcgcgccgcttttaccaatgcttaatcagtgaggcacctatctcagcgatctgtctatttcgttcatccatagttgcctgactccccgtcgtgtagataactacgatacgggagggcttaccatctggccccagcgctgcgatgataccgcgagaaccacgctcaccggctccggatttatcagcaataaaccagccagccggaagggccgagcgcagaagtggtcctgcaactttatccgcctccatccagtctattaattgttgccgggaagctagagtaagtagttcgccagttaatagtttgcgcaacgttgttgccatcgctacaggcatcgtggtgtcacgctcgtcgtttggtatggcttcattcagctccggttcccaacgatcaaggcgagttacatgatcccccatgttgtgcaaaaaagcggttagctccttcggtcctccgatcgttgtcagaagtaagttggccgcagtgttatcactcatggttatggcagcactgcataattctcttactgtcatgccatccgtaagatgcttttctgtgactggtgagtactcaaccaagtcattctgagaatagtgtatgcggcgaccgagttgctcttgcccggcgtcaatacgggataataccgcgccacatagcagaactttaaaagtgctcatcattggaaaacgttcttcggggcgaaaactctcaaggatcttaccgctgttgagatccagttcgatgtaacccactcgtgcacccaactgatcttcagcatcttttactttcaccagcgtttctgggtgagcaaaaacaggaaggcaaaatgccgcaaaaaagggaataagggcgacacggaaatgttgaatactcatattcttcctttttcaatattattgaagcatttatcagggttattgtctcatgagcggatacatatttgaatgtatttagaaaaataaacaaataggggtcagtgttacaaccaattaaccaattctgaacattatcgcgagcccatttatacctgaatatggctcataacaccccttgtttgcctggcggcagtagcgcggtggtcccacctgaccccatgccgaactcagaagtgaaacgccgtagcgccgatggtagtgtggggactccccatgcgagagtagggaactgccaggcatcaaataaaacgaaaggctcagtcgaaagactgggcctttcgcccgggctaattatggggtgtcgcccttattcgactctatagtgaagttcctattctctagtagtataggaacttctgaagtggggctcgagggccggcccagccgtcaaggttaaggctggccatatcagcgactgaaaagcggccagcctcggccttgtttgacgtataaccaaagccaccgggcaaccaatagcccttgtcacttttgatcaggtagaccgaccctgaagcgcttttttcgtattccataaaacccccttctgtgcgtgagtactcatagtataacaggcgtgagtaccaacgct

SEQ ID NO: 135 - DNA, 7966 bp, Artificial Sequence
  vector
ctagattattaggcgaggccacgcgctttgagggtctgttcaaattcttcgaggcaacgttccgccacggcgagcatttcatccacttccgcacgggtcataacgagcggcggtgcagacacaatgtgatcgccgcacgcacgcataatgaggttgttgcgaaaaaaaatatcgcggcagagggtgccaatttcgccaaaatccggaaagagttcacgtttcgctttgtttttcacgagggtaaacgcctgcaccatgcccacgccacgcacatcatccacatgttcaaaacggctaaaggtttcacgccaacgtttctgcatatacgggccaatatcatctttcacacgctgcacaatgccttcatcacggagcgccgcaacattcgcatgcgccaccgccgcacacaccggatggccgctataggtaaagccatggttaaaatcaccgcccgcaatgagaccttccgcaacacgtttgcccacaaacaccgcgccaatcgggagatagccgctgctgaggcctttcgccgcggtaaagaggtccggctgaaagccaaaatgctgatggccaaaccattcgccggtacggccaaagccgcaaatcacttcatccgcaacgaggagcacatcatatttgcggcaaatacgttcaatttccggccaataggttgccggcggaacaatcacaccgcccgcaccctgaatcggttcgcccacaaacgccgccactttatccgcgccgatttcgagaattttttcttcgagccaacgcgccgcaaccacgccaaattcatccggggtcatatctttgccatgtttataccaccacggctgttcaatatgcgccatgcccggaatcgggagatcgccctgttcatgcatatatttcatgccgccgaggctcgcaccgccaatggtgctgccgtgatagccgttccaacggccaatgagggtttttttttccggtttgccctgcacatcccaataacgacgcaccatacgaatcatggtatccacgctttcgctgccgctgttggtataaaacacacgatcaaaacctgccggggtaacttcggcgaggaggctgctgagttccaccaccgccggatgggtggttttaaagaaggtgttataaaacgggagttcttccatctgacgacgcgccgcttccgcaaaatctttacggccatagcccacgttcacgcaccagaggcccgccatgccatcaataattttgttgccttcgctatcccagagatacacgccttcgccacgggtcatcacacgcgcacccgcctgattgaggctcgcggtatcggtaaacggatggagatgatgcgccgcatcgagttcacgccactgagaggtggtacgctgtttctgcatattatatctccttaaagctttaagcacccgccacagatgattcatcctgtaaagctttctcggcaggaacatactcatagcctagatctcttgctacagcttcataggtcacgtgtccgtttgcggtgtttaaacccgctctcagtgccgtattgtctgcgagcgcttttactgcccctttgttcgcgatttgcagcgcgtatggaacagtaacgttagtcagggcgattgttgatgtacgagggactgcgcctggcatgttcgctacagcataatgcacaaccccgtgtttttcatatgttggctgatcatgtgttgtgatatggtcgacagtttcgacgatgccgccttggtcgatcgctacatcaacaataactgaaccgggtttcatttgttttaccatttcctcagtgacaagagtcggagctttagcacccggaattaataccgcgcaaatgaggagatccgcttccgccacagcatcagcaatattgaccggattagaaattaacgttttaatctgatggccgaagatgtcatcaagctggcgcaagcggtctgcgtttaagtcaatgatcgtcacatctgcaccgaggccgacagccattttcgccgcgtttgtcccgacaacgcctcctccgataattgttacttttccgcgggaaacgccaggcaccccggcaagcagaatgccttttccgcctttaggcttttctaagaattgagcgccgatttgcgctgccattctgcccgcaacctctgacattggcgtcagaagaggcaatgtccggccttcactgaccgtttcatatgcgatggcagttactcctttatccttcaaggcctgtgcaagctcaggctcagctgctaaatgaaggtacgtaaacagcacaagtcctttgcgaaaataaacatattcttccggcagcggttcttttactttcatgaccatttcggcgtcccagacctgcttcggatcagcaatgatttccgctcctgctgactcataggcttcattttcaaatccgcttccaaggcccgcgcctgtttcaaccagcacccggtggccgtttgaaatgagctgagaaacgcccccgggtgttaatgcgacacggttttcattgttttttatctctttaggaacccctatgatcattatgccactctccttggttcctagatcctgtgtgaaattgttattgttatccgctcacaattccacacattatacgagccggaagcataaagtgtcaagcctggggtgcctaatgagtgagctaacttacattaattgcgttgcgctcactgcccgcatatctatgagccgggctgaatgatcgaccgagacaggccctgcggggctgcaggatccaattgtgagcggataacaattacgagcttcatgcacagtgatcgacgctgttgacaattaatcatcggctcgtataatgtgtggatgtggaattgtgagcgctcacaattccacaacggtttccctctagaaataattttgtttaacaggaggtaaaacatatgcacgaccgcaaatccaaacgcccggacatgctggtagactcgtttggtctggaaagcacggtccaggacggcctggtgtttcgtcaatcctttagcatccgcagctacgagattggcacggatcgtaccgcgagcatcgaaaccctgatgaaccacctgcaggaaaccagcttgaaccactgtaaatctaccggtatcctgttggatggtttcggtcgcaccctggagatgtgtaagcgtgatttgatttgggtggtgattaagatgcagatcaaagttaaccgttacccggcctggggtgacaccgttgagattaacacgcgtttcagccgtctgggtaagattggtatgggtcgcgactggctgattagcgattgcaatacgggcgaaatcctggtgcgtgcgaccagcgcgtatgccatgatgaatcagaaaactcgtcgcctgagcaagctgccgtacgaggtgcatcaggaaatcgtccctctgttcgttgactctccggttatcgaggatagcgatctgaaggtccataagttcaaggttaagaccggtgacagcatccaaaaaggcttgaccccaggctggaacgatctggatgtgaatcaacatgtcagcaacgtcaaatacattggctggattctggagagcatgccgaccgaggtcctggaaacgcaggagctgtgcagcctggctctggaatatcgtcgcgagtgcggccgtgacagcgttttggaaagcgtgacggcgatggacccgtccaaagttggtgtgcgtagccaatatcaacacctgctgcgtctggaggatggtactgcaatcgtcaatggtgcaaccgagtggcgtccgaaaaatgcaggtgcgaatggtgctattagcaccggcaagacgtctaatggcaacagcgtttcctaatagtcaaaagcctccggtcggaggcttttgactttctgcttactgaatttgcggccgcctcgagaaaatgaagggaagttcctatacttactagagaataggaacttctatagggagtcgaataagggcgacacaaaaggtattctaaatgcataataaatactgataacatcttatagtttgtattatattttgtattatcgttgacatgtataattttgatatcaaaaactgattttccctttattattttcgagatttattttcttaattctctttaacaaactagaaatattgtatatacaaaaaatcataaataatagatgaatagtttaattataggtgttcatcaatcgaaaaagcaacgtatcttatttaaagtgcgttgcttttttctcatttataaggttaaataattctcatatatcaagcaaagtgacaggcgcccttaaatattctgacaaatgctctttccctaaactccccccataaaaaaacccgccgaagcgggtttttacgttatttgcggattaacgattactcgttatcagaaccgcccaggatgcctggcagttccctactctcgccgctgcgctcggtcgttcggctgcgggacctcagcgctagcggagtgtatactggcttactatgttggcactgatgagggtgtcagtgaagtgcttcatgtggcaggagaaaaaaggctgcaccggtgcgtcagcagaatatgtgatacaggatatattccgcttcctcgctcactgactcgctacgctcggtcgttcgactgcggcgagcggaaatggcttacgaacggggcggagatttcctggaagatgccaggaagatacttaacagggaagtgagagggccgcggcaaagccgtttttccataggctccgcccccctgacaagcatcacgaaatctgacgctcaaatcagtggtggcgaaacccgacaggactataaagataccaggcgtttccccctggcggctccctcgtgcgctctcctgttcctgcctttcggtttaccggtgtcattccgctgttatggccgcgtttgtctcattccacgcctgacactcagttccgggtaggcagttcgctccaagctggactgtatgcacgaaccccccgttcagtccgaccgctgcgccttatccggtaactatcgtcttgagtccaacccggaaagacatgcaaaagcaccactggcagcagccactggtaattgatttagaggagttagtcttgaagtcatgcgccggttaaggctaaactgaaaggacaagttttggtgactgcgctcctccaagccagttacctcggttcaaagagttggtagctcagagaaccttcgaaaaaccgccctgcaaggcggttttttcgttttcagagcaagagattacgcgcagaccaaaacgatctcaagaagatcatcttattaatcactgcccgctttccagtcgggaaacctgtcgtgccagctgcattaatgaatcggccaacgcgcggggagaggcggtttgcgtattgggcgccagggtggtttttcttttcaccagtgagactggcaacagctgattgcccttcaccgcctggccctgagagagttgcagcaagcggtccacgctggtttgccccagcaggcgaaaatcctgtttgatggtggttaacggcgggatataacatgagctatcttcggtatcgtcgtatcccactaccgagatatccgcaccaacgcgcagcccggactcggtaatggcgcgcattgcgcccagcgccatctgatcgttggcaaccagcatcgcagtgggaacgatgccctcattcagcatttgcatggtttgttgaaaaccggacatggcactccagtcgccttcccgttccgctatcggctgaatttgattgcgagtgagatatttatgccagccagccagacgcagacgcgccgagacagaacttaatgggcccgctaacagcgcgatttgctggtgacccaatgcgaccagatgctccacgcccagtcgcgtaccgtcctcatgggagaaaataatactgttgatgggtgtctggtcagagacatcaagaaataacgccggaacattagtgcaggcagcttccacagcaatggcatcctggtcatccagcggatagttaatgatcagcccactgacgcgttgcgcgagaagattgtgcaccgccgctttacaggcttcgacgccgcttcgttctaccatcgacaccaccacgctggcacccagttgatcggcgcgagatttaatcgccgcgacaatttgcgacggcgcgtgcagggccagactggaggtggcaacgccaatcagcaacgactgtttgcccgccagttgttgtgccacgcggttgggaatgtaattcagctccgccatcgccgcttccactttttcccgcgttttcgcagaaacgtggctggcctggttcaccacgcgggaaacggtctgataagagacaccggcatactctgcgacatcgtataacgttactggtttcatattcaccaccctgaattgactctcttccgggcgctatcatgccataccgcgaaaggttttgcgccattcgatggcgcgccgcttttaccaatgcttaatcagtgaggcacctatctcagcgatctgtctatttcgttcatccatagttgcctgactccccgtcgtgtagataactacgatacgggagggcttaccatctggccccagcgctgcgatgataccgcgagaaccacgctcaccggctccggatttatcagcaataaaccagccagccggaagggccgagcgcagaagtggtcctgcaactttatccgcctccatccagtctattaattgttgccgggaagctagagtaagtagttcgccagttaatagtttgcgcaacgttgttgccatcgctacaggcatcgtggtgtcacgctcgtcgtttggtatggcttcattcagctccggttcccaacgatcaaggcgagttacatgatcccccatgttgtgcaaaaaagcggttagctccttcggtcctccgatcgttgtcagaagtaagttggccgcagtgttatcactcatggttatggcagcactgcataattctcttactgtcatgccatccgtaagatgcttttctgtgactggtgagtactcaaccaagtcattctgagaatagtgtatgcggcgaccgagttgctcttgcccggcgtcaatacgggataataccgcgccacatagcagaactttaaaagtgctcatcattggaaaacgttcttcggggcgaaaactctcaaggatcttaccgctgttgagatccagttcgatgtaacccactcgtgcacccaactgatcttcagcatcttttactttcaccagcgtttctgggtgagcaaaaacaggaaggcaaaatgccgcaaaaaagggaataagggcgacacggaaatgttgaatactcatattcttcctttttcaatattattgaagcatttatcagggttattgtctcatgagcggatacatatttgaatgtatttagaaaaataaacaaataggggtcagtgttacaaccaattaaccaattctgaacattatcgcgagcccatttatacctgaatatggctcataacaccccttgtttgcctggcggcagtagcgcggtggtcccacctgaccccatgccgaactcagaagtgaaacgccgtagcgccgatggtagtgtggggactccccatgcgagagtagggaactgccaggcatcaaataaaacgaaaggctcagtcgaaagactgggcctttcgcccgggctaattatggggtgtcgcccttattcgactctatagtgaagttcctattctctagtagtataggaacttctgaagtggggctcgagggccggcccagccgtcaaggttaaggctggccatatcagcgactgaaaagcggccagcctcggccttgtttgacgtataaccaaagccaccgggcaaccaatagcccttgtcacttttgatcaggtagaccgaccctgaagcgcttttttcgtattccataaaacccccttctgtgcgtgagtactcatagtataacaggcgtgagtaccaacgct

SEQ ID NO: 136 - DNA, 7958 bp, Artificial Sequence
  vector
ctagattattaggcgaggccacgcgctttgagggtctgttcaaattcttcgaggcaacgttccgccacggcgagcatttcatccacttccgcacgggtcataacgagcggcggtgcagacacaatgtgatcgccgcacgcacgcataatgaggttgttgcgaaaaaaaatatcgcggcagagggtgccaatttcgccaaaatccggaaagagttcacgtttcgctttgtttttcacgagggtaaacgcctgcaccatgcccacgccacgcacatcatccacatgttcaaaacggctaaaggtttcacgccaacgtttctgcatatacgggccaatatcatctttcacacgctgcacaatgccttcatcacggagcgccgcaacattcgcatgcgccaccgccgcacacaccggatggccgctataggtaaagccatggttaaaatcaccgcccgcaatgagaccttccgcaacacgtttgcccacaaacaccgcgccaatcgggagatagccgctgctgaggcctttcgccgcggtaaagaggtccggctgaaagccaaaatgctgatggccaaaccattcgccggtacggccaaagccgcaaatcacttcatccgcaacgaggagcacatcatatttgcggcaaatacgttcaatttccggccaataggttgccggcggaacaatcacaccgcccgcaccctgaatcggttcgcccacaaacgccgccactttatccgcgccgatttcgagaattttttcttcgagccaacgcgccgcaaccacgccaaattcatccggggtcatatctttgccatgtttataccaccacggctgttcaatatgcgccatgcccggaatcgggagatcgccctgttcatgcatatatttcatgccgccgaggctcgcaccgccaatggtgctgccgtgatagccgttccaacggccaatgagggtttttttttccggtttgccctgcacatcccaataacgacgcaccatacgaatcatggtatccacgctttcgctgccgctgttggtataaaacacacgatcaaaacctgccggggtaacttcggcgaggaggctgctgagttccaccaccgccggatgggtggttttaaagaaggtgttataaaacgggagttcttccatctgacgacgcgccgcttccgcaaaatctttacggccatagcccacgttcacgcaccagaggcccgccatgccatcaataattttgttgccttcgctatcccagagatacacgccttcgccacgggtcatcacacgcgcacccgcctgattgaggctcgcggtatcggtaaacggatggagatgatgcgccgcatcgagttcacgccactgagaggtggtacgctgtttctgcatattatatctccttaaagctttaagcacccgccacagatgattcatcctgtaaagctttctcggcaggaacatactcatagcctagatctcttgctacagcttcataggtcacgtgtccgtttgcggtgtttaaacccgctctcagtgccgtattgtctgcgagcgcttttactgcccctttgttcgcgatttgcagcgcgtatggaacagtaacgttagtcagggcgattgttgatgtacgagggactgcgcctggcatgttcgctacagcataatgcacaaccccgtgtttttcatatgttggctgatcatgtgttgtgatatggtcgacagtttcgacgatgccgccttggtcgatcgctacatcaacaataactgaaccgggtttcatttgttttaccatttcctcagtgacaagagtcggagctttagcacccggaattaataccgcgcaaatgaggagatccgcttccgccacagcatcagcaatattgaccggattagaaattaacgttttaatctgatggccgaagatgtcatcaagctggcgcaagcggtctgcgtttaagtcaatgatcgtcacatctgcaccgaggccgacagccattttcgccgcgtttgtcccgacaacgcctcctccgataattgttacttttccgcgggaaacgccaggcaccccggcaagcagaatgccttttccgcctttaggcttttctaagaattgagcgccgatttgcgctgccattctgcccgcaacctctgacattggcgtcagaagaggcaatgtccggccttcactgaccgtttcatatgcgatggcagttactcctttatccttcaaggcctgtgcaagctcaggctcagctgctaaatgaaggtacgtaaacagcacaagtcctttgcgaaaataaacatattcttccggcagcggttcttttactttcatgaccatttcggcgtcccagacctgcttcggatcagcaatgatttccgctcctgctgactcataggcttcattttcaaatccgcttccaaggcccgcgcctgtttcaaccagcacccggtggccgtttgaaatgagctgagaaacgcccccgggtgttaatgcgacacggttttcattgttttttatctctttaggaacccctatgatcattatgccactctccttggttcctagatcctgtgtgaaattgttattgttatccgctcacaattccacacattatacgagccggaagcataaagtgtcaagcctggggtgcctaatgagtgagctaacttacattaattgcgttgcgctcactgcccgcatatctatgagccgggctgaatgatcgaccgagacaggccctgcggggctgcaggatccaattgtgagcggataacaattacgagcttcatgcacagtgatcgacgctgttgacaattaatcatcggctcgtataatgtgtggatgtggaattgtgagcgctcacaattccacaacggtttccctctagaaataattttgtttacaaggaggattataaaatgactctagagtggaaaccgaaaccaaaactgcctcaactgctggatgatcacttcggtctgcacggtctggtgtttcgtcgtactttcgcaattcgttcttatgaagtgggtccagatcgttctacctccatcctggccgtcatgaaccacatgcaggaagccaccctgaatcacgcgaaatctgttggtatcctgggtgatggtttcggcactactctggaaatgtctaaacgtgacctgatgtgggtagtgcgtcgcacccacgtagcagtagagcgctaccctacttggggtgacactgtggaagtcgagtgttggattggcgcgtccggtaacaatggtatgcgtcgcgattttctggtccgtgactgtaaaacgggcgaaatcctgacgcgttgcacctccctgagcgttctgatgaacacccgcactcgtcgcctgtctaccatcccggacgaagtgcgcggtgagatcggtcctgctttcatcgataacgtggcagttaaagacgacgaaatcaagaaactgcaaaaactgaacgactccaccgcggactacatccagggcggtctgactccgcgctggaacgacctggatgttaatcagcatgtgaacaacctgaaatacgttgcttgggtcttcgagactgtgccggacagcattttcgaaagccatcacatttcctcttttactctggagtaccgtcgcgaatgtactcgcgactccgttctgcgcagcctgaccaccgtaagcggcggttctagcgaggcaggtctggtctgcgaccatctgctgcaactggaaggcggctccgaagtcctgcgtgcgcgtacggagtggcgtccaaagctgacggattctttccgcggcatctccgtaattccggcggaacctcgtgtttaagctttagtcaaaagcctccggtcggaggcttttgactttctgcttactgaatttgcggccgcctcgagaaaatgaagggaagttcctatacttactagagaataggaacttctatagggagtcgaataagggcgacacaaaaggtattctaaatgcataataaatactgataacatcttatagtttgtattatattttgtattatcgttgacatgtataattttgatatcaaaaactgattttccctttattattttcgagatttattttcttaattctctttaacaaactagaaatattgtatatacaaaaaatcataaataatagatgaatagtttaattataggtgttcatcaatcgaaaaagcaacgtatcttatttaaagtgcgttgcttttttctcatttataaggttaaataattctcatatatcaagcaaagtgacaggcgcccttaaatattctgacaaatgctctttccctaaactccccccataaaaaaacccgccgaagcgggtttttacgttatttgcggattaacgattactcgttatcagaaccgcccaggatgcctggcagttccctactctcgccgctgcgctcggtcgttcggctgcgggacctcagcgctagcggagtgtatactggcttactatgttggcactgatgagggtgtcagtgaagtgcttcatgtggcaggagaaaaaaggctgcaccggtgcgtcagcagaatatgtgatacaggatatattccgcttcctcgctcactgactcgctacgctcggtcgttcgactgcggcgagcggaaatggcttacgaacggggcggagatttcctggaagatgccaggaagatacttaacagggaagtgagagggccgcggcaaagccgtttttccataggctccgcccccctgacaagcatcacgaaatctgacgctcaaatcagtggtggcgaaacccgacaggactataaagataccaggcgtttccccctggcggctccctcgtgcgctctcctgttcctgcctttcggtttaccggtgtcattccgctgttatggccgcgtttgtctcattccacgcctgacactcagttccgggtaggcagttcgctccaagctggactgtatgcacgaaccccccgttcagtccgaccgctgcgccttatccggtaactatcgtcttgagtccaacccggaaagacatgcaaaagcaccactggcagcagccactggtaattgatttagaggagttagtcttgaagtcatgcgccggttaaggctaaactgaaaggacaagttttggtgactgcgctcctccaagccagttacctcggttcaaagagttggtagctcagagaaccttcgaaaaaccgccctgcaaggcggttttttcgttttcagagcaagagattacgcgcagaccaaaacgatctcaagaagatcatcttattaatcactgcccgctttccagtcgggaaacctgtcgtgccagctgcattaatgaatcggccaacgcgcggggagaggcggtttgcgtattgggcgccagggtggtttttcttttcaccagtgagactggcaacagctgattgcccttcaccgcctggccctgagagagttgcagcaagcggtccacgctggtttgccccagcaggcgaaaatcctgtttgatggtggttaacggcgggatataacatgagctatcttcggtatcgtcgtatcccactaccgagatatccgcaccaacgcgcagcccggactcggtaatggcgcgcattgcgcccagcgccatctgatcgttggcaaccagcatcgcagtgggaacgatgccctcattcagcatttgcatggtttgttgaaaaccggacatggcactccagtcgccttcccgttccgctatcggctgaatttgattgcgagtgagatatttatgccagccagccagacgcagacgcgccgagacagaacttaatgggcccgctaacagcgcgatttgctggtgacccaatgcgaccagatgctccacgcccagtcgcgtaccgtcctcatgggagaaaataatactgttgatgggtgtctggtcagagacatcaagaaataacgccggaacattagtgcaggcagcttccacagcaatggcatcctggtcatccagcggatagttaatgatcagcccactgacgcgttgcgcgagaagattgtgcaccgccgctttacaggcttcgacgccgcttcgttctaccatcgacaccaccacgctggcacccagttgatcggcgcgagatttaatcgccgcgacaatttgcgacggcgcgtgcagggccagactggaggtggcaacgccaatcagcaacgactgtttgcccgccagttgttgtgccacgcggttgggaatgtaattcagctccgccatcgccgcttccactttttcccgcgttttcgcagaaacgtggctggcctggttcaccacgcgggaaacggtctgataagagacaccggcatactctgcgacatcgtataacgttactggtttcatattcaccaccctgaattgactctcttccgggcgctatcatgccataccgcgaaaggttttgcgccattcgatggcgcgccgcttttaccaatgcttaatcagtgaggcacctatctcagcgatctgtctatttcgttcatccatagttgcctgactccccgtcgtgtagataactacgatacgggagggcttaccatctggccccagcgctgcgatgataccgcgagaaccacgctcaccggctccggatttatcagcaataaaccagccagccggaagggccgagcgcagaagtggtcctgcaactttatccgcctccatccagtctattaattgttgccgggaagctagagtaagtagttcgccagttaatagtttgcgcaacgttgttgccatcgctacaggcatcgtggtgtcacgctcgtcgtttggtatggcttcattcagctccggttcccaacgatcaaggcgagttacatgatcccccatgttgtgcaaaaaagcggttagctccttcggtcctccgatcgttgtcagaagtaagttggccgcagtgttatcactcatggttatggcagcactgcataattctcttactgtcatgccatccgtaagatgcttttctgtgactggtgagtactcaaccaagtcattctgagaatagtgtatgcggcgaccgagttgctcttgcccggcgtcaatacgggataataccgcgccacatagcagaactttaaaagtgctcatcattggaaaacgttcttcggggcgaaaactctcaaggatcttaccgctgttgagatccagttcgatgtaacccactcgtgcacccaactgatcttcagcatcttttactttcaccagcgtttctgggtgagcaaaaacaggaaggcaaaatgccgcaaaaaagggaataagggcgacacggaaatgttgaatactcatattcttcctttttcaatattattgaagcatttatcagggttattgtctcatgagcggatacatatttgaatgtatttagaaaaataaacaaataggggtcagtgttacaaccaattaaccaattctgaacattatcgcgagcccatttatacctgaatatggctcataacaccccttgtttgcctggcggcagtagcgcggtggtcccacctgaccccatgccgaactcagaagtgaaacgccgtagcgccgatggtagtgtggggactccccatgcgagagtagggaactgccaggcatcaaataaaacgaaaggctcagtcgaaagactgggcctttcgcccgggctaattatggggtgtcgcccttattcgactctatagtgaagttcctattctctagtagtataggaacttctgaagtggggctcgagggccggcccagccgtcaaggttaaggctggccatatcagcgactgaaaagcggccagcctcggccttgtttgacgtataaccaaagccaccgggcaaccaatagcccttgtcacttttgatcaggtagaccgaccctgaagcgcttttttcgtattccataaaacccccttctgtgcgtgagtactcatagtataacaggcgtgagtaccaacgct

SEQ ID NO: 137 - DNA, 1545 bp, Marinobacter aquaeolei
  CDS (1)..(1545)
atggcaattcagcaggtacatcacgcggacacgagcagcagcaaagtattgggtcaactgcgtggcaagcgtgtcctgattacgggcaccacgggtttcctgggtaaggtcgtgctggagcgcttgattcgcgctgtgccggacattggtgcgatctatttgttgatccgtggtaataagcgtcacccggatgcacgttctcgctttttggaagagatcgcgaccagctcggtgttcgatcgcctgcgtgaagcagactccgagggttttgacgcattcctggaagagcgcattcactgtgtgactggcgaggtcacggaagcaggttttggcatcggccaagaggactaccgcaaactggcgaccgaattggacgcggtgattaacagcgcagcgagcgtgaactttcgtgaagaactggacaaggcgctggcgatcaacactctgtgcctgcgcaatatcgcgggtatggtggatctgaatccaaaactggcggtcctgcaagttagcacttgctatgtgaacggtatgaacagcggtcaagttaccgaaagcgtgatcaagccggcaggtgaagcggttccgcgtagcccggatggtttttacgagattgaagagctggtgcgcctgctgcaggacaaaatcgaggacgttcaggctcgttatagcggcaaggtcctggagcgtaagctggttgatctgggcattcgtgaagcgaatcgttatggctggagcgacacgtacacgtttaccaagtggctgggtgagcagctgttgatgaaagcgctgaatggtcgcaccttgaccatcctgcgtccgagcattattgagtctgccctggaagaacctgcgcctggctggatcgagggtgtgaaggttgcagacgcaatcattctggcctatgcgcgtgagaaggttaccctgttcccgggtaagcgtagcggtattatcgatgtcatcccggttgacctggtcgccaacagcattattctgagcctggcggaagcgctgggcgagccaggccgtcgccgcatctatcaatgctgttctggtggtggtaacccgatcagcctgggtgagttcatcgaccatctgatggccgagagcaaagcaaattacgccgcatacgatcacctgttctaccgtcagccgtccaaaccgtttttggcggtcaatcgcgcgctgttcgatctggttattagcggtgttcgtctgccgctgagcctgacggatcgcgttctgaagctgttgggtaactcccgtgatctgaaaatgctgcgcaatctggacaccacccaatccctggccaccattttcggcttctataccgctccggactacatcttccgtaatgatgaactgatggccctggccaaccgtatgggcgaggtcgataaaggcctgtttccggttgatgcgcgtctgattgactgggagctgtacctgcgtaaaatccatctggctggcctgaaccgttacgcattgaaagaacgtaaagtctactcgctgaaaaccgctcgtcagcgcaaaaaggccgcgtaatga

SEQ ID NO: 138 - protein, 513 aa, Marinobacter aquaeolei; identical to SEQ ID NO: 84

SEQ ID NO: 139 - DNA, 1986 bp, Marinobacter aquaeolei
  CDS (1)..(1986)
atgaactattttcttacaggcggtacaggtttcattggtagatttctggttgaaaaactcctggcccgtggcggtaccgtttacgtcctggtgcgcgaacagtctcaggataaactggaacgcctgcgtgagcgttggggtgccgatgacaaacaagtcaaagccgttatcggcgacctgaccagcaagaacctgggcatcgacgccaagaccctgaaatcgctgaaaggtaacattgaccacgtgtttcacttggcggcagtatatgatatgggtgcggacgaagaggcgcaagcagcgaccaacattgagggtacccgtgccgctgtccaggcagccgaggcgatgggcgctaagcactttcatcacgtttccagcattgcggcagccggtctgttcaagggcatctttcgtgaggatatgttcgaagaggccgaaaagctggatcacccgtatctgcgcaccaaacacgagagcgaaaaggtcgtccgcgaagagtgcaaggttccgttccgtatctatcgtccgggtatggttatcggtcatagcgaaacgggcgaaatggataaggttgatggcccgtattacttcttcaaaatgatccaaaagatccgccacgcgctgccgcagtgggtgccgaccattggtatcgaaggtggtcgtctgaatattgttccggtcgacttcgttgtggatgcgctggaccatattgcgcatctggaaggcgaggatggcaactgtttccatctggtggacagcgacccatacaaagttggcgagatcctgaacattttctgtgaggcaggccacgcaccgcgtatgggtatgcgcatcgacagccgcatgtttggtttcattccaccgtttatccgtcagagcatcaagaatctgccgccagtgaagcgcatcacgggtgcactgctggacgatatgggtattccgccgagcgtcatgtctttcatcaattatccgacgcgcttcgatactcgtgagctggagcgtgttttgaagggcaccgatatcgaagttccgcgtctgccgagctacgcccctgtgatctgggactattgggagcgtaacctggacccagatctgtttaaggaccgtacgttgaaaggtaccgttgaaggcaaggtgtgcgttgtcacgggcgcaaccagcggtattggcctggcgaccgccgagaagctggcagaggcgggtgctatcctggtcattggtgcacgtaccaaagaaacgctggacgaggtggcagcgagcctggaagcgaaaggtggtaacgttcacgcttatcaatgtgatttctctgatatggacgattgcgatcgctttgtgaaaaccgttctggacaatcacggccatgtggatgtcctggttaacaatgctggtcgtagcattcgccgttccctggcgctgtctttcgaccgttttcacgattttgagcgcacgatgcagctgaattactttggcagcgtgcgtctgattatgggtttcgcccctgcgatgttggagcgccgtcgcggtcatgtggtgaacatcagcagcattggcgtcttgaccaatgcaccgcgcttcagcgcatacgttagcagcaagagcgcgctggacgccttctctcgttgcgcggcagctgagtggagcgaccgcaatgtgacctttacgacgatcaacatgccgttggtcaaaaccccgatgattgcgccgaccaaaatctacgactccgtgccgaccctgaccccggacgaggcggctcaaatggtggcggacgcgattgtctaccgtccgaagcgtatcgcgacgcgtctgggtgtgtttgcgcaagtgctgcacgcgttggcaccgaaaatgggtgagattatcatgaatactggctaccgtatgttcccggacagcccggcagcagcgggttcgaaaagcggtgagaaaccgaaagttagcacggaacaggtcgcttttgcggcaattatgcgtggtatttactggtaa

SEQ ID NO: 140 - protein, 661 aa, Marinobacter aquaeolei
MNYFLTGGTGFIGRFLVEKLLARGGTVYVLVREQSQDKLERLRERWGADDKQVKAVIGDLTSKNLGIDAKTLKSLKGNIDHVFHLAAVYDMGADEEAQAATNIEGTRAAVQAAEAMGAKHFHHVSSIAAAGLFKGIFREDMFEEAEKLDHPYLRTKHESEKVVREECKVPFRIYRPGMVIGHSETGEMDKVDGPYYFFKMIQKIRHALPQWVPTIGIEGGRLNIVPVDFVVDALDHIAHLEGEDGNCFHLVDSDPYKVGEILNIFCEAGHAPRMGMRIDSRMFGFIPPFIRQSIKNLPPVKRITGALLDDMGIPPSVMSFINYPTRFDTRELERVLKGTDIEVPRLPSYAPVIWDYWERNLDPDLFKDRTLKGTVEGKVCVVTGATSGIGLATAEKLAEAGAILVIGARTKETLDEVAASLEAKGGNVHAYQCDFSDMDDCDRFVKTVLDNHGHVDVLVNNAGRSIRRSLALSFDRFHDFERTMQLNYFGSVRLIMGFAPAMLERRRGHVVNISSIGVLTNAPRFSAYVSSKSALDAFSRCAAAEWSDRNVTFTTINMPLVKTPMIAPTKIYDSVPTLTPDEAAQMVADAIVYRPKRIATRLGVFAQVLHALAPKMGEIIMNTGYRMFPDSPAAAGSKSGEKPKVSTEQVAFAAIMRGIYW

SEQ ID NO: 141 - DNA, 1647 bp, Arabidopsis thaliana
  CDS (1)..(1647)
atggcgacgacgaatgtactggcaacttctcacgcatttaaattgaacggtgttagctactttagcagcttcccgcgcaagccgaatcactacatgccgcgtcgccgtctgagccataccacgcgccgtgttcaaacgagctgcttttacggtgaaaccagctttgaagcggtgaccagcctggttacccctaagaccgaaaccagccgtaatagcgacggcattggcattgttcgtttcctggaaggcaaaagctatctggtgaccggcgcaaccggttttctggccaaggtgctgatcgagaaactgctgcgtgagagcctggaaattggcaagattttcttgctgatgcgtagcaaggatcaagagagcgcgaataagcgtctgtacgacgagatcattagcagcgacctgttcaaactgctgaagcaaatgcatggcagctcttatgaggccttcatgaaacgcaaattgatcccggttatcggtgatatcgaagaagataacctgggtatcaagtccgaaatcgcgaacatgatctccgaagagatcgacgttatcatcagctgtggtggtcgcaccacctttgatgaccgttatgactcggccctgagcgtcaacgccttgggtccaggtcgtctgttgagcttcggcaaaggctgccgtaagttgaaactgttcctgcacttttccactgcttatgtcaccggcaagcgtgaaggcacggtcttggaaaccccgctgtgcatcggcgagaacattacctctgacctgaacatcaaatccgagctgaaactggcaagcgaggcagtgcgtaaattccgtggccgtgaagagattaagaagctgaaagagctgggttttgagcgcgcacagcattatggttgggagaattcgtatacgtttaccaaggcgattggcgaagcggtcattcacagcaagcgcggtaatctgccggtggtcattattcgcccgagcatcatcgagagcagctacaatgaaccgttcccgggctggattcagggtacgcgtatggcggacccgattatcctggcttacgcgaaaggtcagatcagcgatttctgggccgacccacagtccctgatggacatcatcccggttgatatggttgcgaacgcggcgattgctgcgatggcaaaacacggttgtggtgttccggagtttaaggtctacaacctgacgagcagcagccacgtgaacccgatgcgtgcaggtaaactgatcgatctgtcccatcaacacctgtgtgatttccctctggaagaaaccgtcattgacttggagcacatgaagattcattccagcctggaaggttttacgtctgcgctgtctaataccattatcaaacaggagcgcgtgatcgataacgagggtggtggtctgagcacgaaaggcaagcgtaaactgaactatttcgtgagcctggccaaaacgtacgagccgtacaccttctttcaggctcgcttcgataataccaacacgactagcctgattcaagagatgagcatggaagaaaagaaaaccttcggttttgacattaagggcattgactgggagcactacattgtcaatgtgcatctgccgggtctgaagaaagagttcctgagcaagaagaaaaccgagtaa

SEQ ID NO: 142 - protein, 548 aa, Arabidopsis thaliana
MATTNVLATSHAFKLNGVSYFSSFPRKPNHYMPRRRLSHTTRRVQTSCFYGETSFEAVTSLVTPKTETSRNSDGIGIVRFLEGKSYLVTGATGFLAKVLIEKLLRESLEIGKIFLLMRSKDQESANKRLYDEIISSDLFKLLKQMHGSSYEAFMKRKLIPVIGDIEEDNLGIKSEIANMISEEIDVIISCGGRTTFDDRYDSALSVNALGPGRLLSFGKGCRKLKLFLHFSTAYVTGKREGTVLETPLCIGENITSDLNIKSELKLASEAVRKFRGREEIKKLKELGFERAQHYGWENSYTFTKAIGEAVIHSKRGNLPVVIIRPSIIESSYNEPFPGWIQGTRMADPIILAYAKGQISDFWADPQSLMDIIPVDMVANAAIAAMAKHGCGVPEFKVYNLTSSSHVNPMRAGKLIDLSHQHLCDFPLEETVIDLEHMKIHSSLEGFTSALSNTIIKQERVIDNEGGGLSTKGKRKLNYFVSLAKTYEPYTFFQARFDNTNTTSLIQEMSMEEKKTFGFDIKGIDWEHYIVNVHLPGLKKEFLSKKKTE

SEQ ID NO: 143 - DNA, 888 bp, Acinetobacter sp. M-1; identical to SEQ ID NO: 77
  CDS (1)..(888)

SEQ ID NO: 144 - protein, 295 aa, Acinetobacter sp. M-1; identical to SEQ ID NO: 78

SEQ ID NO: 145 - DNA, 915 bp, Acinetobacter sp. ADP1
  CDS (1)..(915)
ttgatctcgatccgtgaaaaacgtgttaacaagaaattggaggccctgtttcgtgagaatgtcaaaggcaaggttgccctgatcacgggtgctagcagcggcatcggcctgacgattgccaaacgcattgctgcggcaggtgcacatgttctgttggtcgcgcgcacccaggaaaccctggaagaagtgaaggcagcaatcgagcaacagggtggccaggccagcattttcccgtgtgacctgaccgatatgaatgcgattgatcagctgagccaacagattatggcatccgtcgaccacgtagattttctgatcaacaatgccggtcgcagcattcgtcgcgcagtgcacgaaagcttcgaccgttttcatgatttcgagcgtacgatgcaattgaactacttcggtgcggtgcgtctggtcctgaacctgctgccgcacatgatcaaacgtaagaacggtcaaatcatcaatatcagcagcatcggcgtgctggcgaatgcgactcgctttagcgcgtacgttgcgagcaaagcagcgctggatgcgttttctcgttgcctgagcgcagaagttttgaaacataagattagcatcacgagcatttacatgccgttggtgcgtaccccgatgatcgccccgaccaaaatctataagtatgtgccgacgctgagcccggaagaggcagctgacctgattgtctacgctattgttaaacgtccaaagcgtattgcgacccacctgggtcgcttggcgtccatcacctacgcgattgcgccggacattaacaatattctgatgtccattggtttcaacctgttccctagctctaccgcggctctgggcgagcaggagaagctgaatctgctgcaacgtgcctatgcgcgcctgttcccgggtgagcactggtgataa

SEQ ID NO: 146 - protein, 303 aa, Acinetobacter sp. ADP1; identical to SEQ ID NO: 82

SEQ ID NO: 147 - DNA, 888 bp, Acinetobacter sp. ADP1; identical to SEQ ID NO: 79
  CDS (1)..(888)

SEQ ID NO: 148 - protein, 295 aa, Acinetobacter sp. ADP1; identical to SEQ ID NO: 80

SEQ ID NO: 149 - DNA, 162 bp, Artificial Sequence
  promoter
aattgtgagcggataacaattacgagcttcatgcacagtgatcgacaggctttacactttatgcttccggctcgtatgttgtgtggatgtggaattgtgagcgctcacaattccacaacggtttccctctagaaataattttgtttaacaggaggtaaaaca

SEQ ID NO: 150 - DNA, 34 bp, Artificial Sequence
  primer
tatatacatatggcaattcagcaggtacatcacg

SEQ ID NO: 151 - DNA, 34 bp, Artificial Sequence
  primer
tatatagcggccgctcattacgcggcctttttgc

SEQ ID NO: 152 - DNA, 38 bp, Artificial Sequence
  primer
tatatacatatgaactattttcttacaggcggtacagg

SEQ ID NO: 153 - DNA, 44 bp, Artificial Sequence
  primer
tatatagcggccgcttattaccagtaaataccacgcataattgc

SEQ ID NO: 154 - DNA, 32 bp, Artificial Sequence
  primer
tatatacatatggcgacgacgaatgtactggc

SEQ ID NO: 155 - DNA, 42 bp, Artificial Sequence
  primer
tatatagcggccgcttattactcggttttcttcttgctcagg

SEQ ID NO: 156 - DNA, 40 bp, Artificial Sequence
  primer
tatatacatatgaatgcaaaactcaaaaaactttttcagc

SEQ ID NO: 157 - DNA, 36 bp, Artificial Sequence
  primer
tatatagcggccgcttattaccagtgttcgcctggg

SEQ ID NO: 158 - DNA, 40 bp, Artificial Sequence
  primer
aacaggaggtaaaacattgatctcgatccgtgaaaaacgt

SEQ ID NO: 159 - DNA, 40 bp, Artificial Sequence
  primer
tgaagtgggggcggccttatcaccagtgctcacccgggaa

SEQ ID NO: 160 - DNA, 40 bp, Artificial Sequence
  primer
aacaggaggtaaaacagtgaacaaaaaacttgaagctctc

SEQ ID NO: 161 - DNA, 40 bp, Artificial Sequence
  primer
tgaagtgggggcggccttattaccagtgttcgcctgggaa

SEQ ID NO: 162 - DNA, 5564 bp, Artificial Sequence
  vector
accaatgcttaatcagtgaggcacctatctcagcgatctgtctatttcgttcatccatagttgcctgactccccgtcgtgtagataactacgatacgggagggcttaccatctggccccagcgctgcgatgataccgcgagaaccacgctcaccggctccggatttatcagcaataaaccagccagccggaagggccgagcgcagaagtggtcctgcaactttatccgcctccatccagtctattaattgttgccgggaagctagagtaagtagttcgccagttaatagtttgcgcaacgttgttgccatcgctacaggcatcgtggtgtcacgctcgtcgtttggtatggcttcattcagctccggttcccaacgatcaaggcgagttacatgatcccccatgttgtgcaaaaaagcggttagctccttcggtcctccgatcgttgtcagaagtaagttggccgcagtgttatcactcatggttatggcagcactgcataattctcttactgtcatgccatccgtaagatgcttttctgtgactggtgagtactcaaccaagtcattctgagaatagtgtatgcggcgaccgagttgctcttgcccggcgtcaatacgggataataccgcgccacatagcagaactttaaaagtgctcatcattggaaaacgttcttcggggcgaaaactctcaaggatcttaccgctgttgagatccagttcgatgtaacccactcgtgcacccaactgatcttcagcatcttttactttcaccagcgtttctgggtgagcaaaaacaggaaggcaaaatgccgcaaaaaagggaataagggcgacacggaaatgttgaatactcatattcttcctttttcaatattattgaagcatttatcagggttattgtctcatgagcggatacatatttgaatgtatttagaaaaataaacaaataggggtcagtgttacaaccaattaaccaattctgaacattatcgcgagcccatttatacctgaatatggctcataacaccccttgtttgcctggcggcagtagcgcggtggtcccacctgaccccatgccgaactcagaagtgaaacgccgtagcgccgatggtagtgtggggactccccatgcgagagtagggaactgccaggcatcaaataaaacgaaaggctcagtcgaaagactgggcctttcgcccgggctaattatggggtgtcgcccttattcgactctatagtgaagttcctattctctagaaagtataggaacttctgaagtgggggcggccgctcattacgcggcctttttgcgctgacgagcggttttcagcgagtagactttacgttctttcaatgcgtaacggttcaggccagccagatggattttacgcaggtacagctcccagtcaatcagacgcgcatcaaccggaaacaggcctttatcgacctcgcccatacggttggccagggccatcagttcatcattacggaagatgtagtccggagcggtatagaagccgaaaatggtggccagggattgggtggtgtccagattgcgcagcattttcagatcacgggagttacccaacagcttcagaacgcgatccgtcaggctcagcggcagacgaacaccgctaataaccagatcgaacagcgcgcgattgaccgccaaaaacggtttggacggctgacggtagaacaggtgatcgtatgcggcgtaatttgctttgctctcggccatcagatggtcgatgaactcacccaggctgatcgggttaccaccaccagaacagcattgatagatgcggcgacggcctggctcgcccagcgcttccgccaggctcagaataatgctgttggcgaccaggtcaaccgggatgacatcgataataccgctacgcttacccgggaacagggtaaccttctcacgcgcataggccagaatgattgcgtctgcaaccttcacaccctcgatccagccaggcgcaggttcttccagggcagactcaataatgctcggacgcaggatggtcaaggtgcgaccattcagcgctttcatcaacagctgctcacccagccacttggtaaacgtgtacgtgtcgctccagccataacgattcgcttcacgaatgcccagatcaaccagcttacgctccaggaccttgccgctataacgagcctgaacgtcctcgattttgtcctgcagcaggcgcaccagctcttcaatctcgtaaaaaccatccgggctacgcggaaccgcttcacctgccggcttgatcacgctttcggtaacttgaccgctgttcataccgttcacatagcaagtgctaacttgcaggaccgccagttttggattcagatccaccatacccgcgatattgcgcaggcacagagtgttgatcgccagcgccttgtccagttcttcacgaaagttcacgctcgctgcgctgttaatcaccgcgtccaattcggtcgccagtttgcggtagtcctcttggccgatgccaaaacctgcttccgtgacctcgccagtcacacagtgaatgcgctcttccaggaatgcgtcaaaaccctcggagtctgcttcacgcaggcgatcgaacaccgagctggtcgcgatctcttccaaaaagcgagaacgtgcatccgggtgacgcttattaccacggatcaacaaatagatcgcaccaatgtccggcacagcgcgaatcaagcgctccagcacgaccttacccaggaaacccgtggtgcccgtaatcaggacacgcttgccacgcagttgacccaatactttgctgctgctcgtgtccgcgtgatgtacctgctgaattgccatatgttttacctcctgttaaacaaaattatttctagagggaaaccgttgtggaattgtgagcgctcacaattccacatccacacaacatacgagccggaagcataaagtgtaaagcctgtcgatcactgtgcatgaagctcgtaattgttatccgctcacaattggatccaaaatgaagggaagttcctatactttctagagaataggaacttctatagggagtcgaataagggcgacacaaaaggtattctaaatgcataataaatactgataacatcttatagtttgtattatattttgtattatcgttgacatgtataattttgatatcaaaaactgattttccctttattattttcgagatttattttcttaattctctttaacaaactagaaatattgtatatacaaaaaatcataaataatagatgaatagtttaattataggtgttcatcaatcgaaaaagcaacgtatcttatttaaagtgcgttgcttttttctcatttataaggttaaataattctcatatatcaagcaaagtgacaggcgcccttaaatattctgacaaatgctctttccctaaactccccccataaaaaaacccgccgaagcgggtttttacgttatttgcggattaacgattactcgttatcagaaccgcccaggatgcctggcagttccctactctcgccgctgcgctcggtcgttcggctgcgggacctcagcgctagcggagtgtatactggcttactatgttggcactgatgagggtgtcagtgaagtgcttcatgtggcaggagaaaaaaggctgcaccggtgcgtcagcagaatatgtgatacaggatatattccgcttcctcgctcactgactcgctacgctcggtcgttcgactgcggcgagcggaaatggcttacgaacggggcggagatttcctggaagatgccaggaagatacttaacagggaagtgagagggccgcggcaaagccgtttttccataggctccgcccccctgacaagcatcacgaaatctgacgctcaaatcagtggtggcgaaacccgacaggactataaagataccaggcgtttccccctggcggctccctcgtgcgctctcctgttcctgcctttcggtttaccggtgtcattccgctgttatggccgcgtttgtctcattccacgcctgacactcagttccgggtaggcagttcgctccaagctggactgtatgcacgaaccccccgttcagtccgaccgctgcgccttatccggtaactatcgtcttgagtccaacccggaaagacatgcaaaagcaccactggcagcagccactggtaattgatttagaggagttagtcttgaagtcatgcgccggttaaggctaaactgaaaggacaagttttggtgactgcgctcctccaagccagttacctcggttcaaagagttggtagctcagagaaccttcgaaaaaccgccctgcaaggcggttttttcgttttcagagcaagagattacgcgcagaccaaaacgatctcaagaagatcatcttattaatcactgcccgctttccagtcgggaaacctgtcgtgccagctgcattaatgaatcggccaacgcgcggggagaggcggtttgcgtattgggcgccagggtggtttttcttttcaccagtgagactggcaacagctgattgcccttcaccgcctggccctgagagagttgcagcaagcggtccacgctggtttgccccagcaggcgaaaatcctgtttgatggtggttaacggcgggatataacatgagctatcttcggtatcgtcgtatcccactaccgagatatccgcaccaacgcgcagcccggactcggtaatggcgcgcattgcgcccagcgccatctgatcgttggcaaccagcatcgcagtgggaacgatgccctcattcagcatttgcatggtttgttgaaaaccggacatggcactccagtcgccttcccgttccgctatcggctgaatttgattgcgagtgagatatttatgccagccagccagacgcagacgcgccgagacagaacttaatgggcccgctaacagcgcgatttgctggtgacccaatgcgaccagatgctccacgcccagtcgcgtaccgtcctcatgggagaaaataatactgttgatgggtgtctggtcagagacatcaagaaataacgccggaacattagtgcaggcagcttccacagcaatggcatcctggtcatccagcggatagttaatgatcagcccactgacgcgttgcgcgagaagattgtgcaccgccgctttacaggcttcgacgccgcttcgttctaccatcgacaccaccacgctggcacccagttgatcggcgcgagatttaatcgccgcgacaatttgcgacggcgcgtgcagggccagactggaggtggcaacgccaatcagcaacgactgtttgcccgccagttgttgtgccacgcggttgggaatgtaattcagctccgccatcgccgcttccactttttcccgcgttttcgcagaaacgtggctggcctggttcaccacgcgggaaacggtctgataagagacaccggcatactctgcgacatcgtataacgttactggtttcatattcaccaccctgaattgactctcttccgggcgctatcatgccataccgcgaaaggttttgcgccattcgatggcgcgccgctttt

SEQ ID NO: 163 - DNA, 6008 bp, Artificial Sequence
  vector
accaatgcttaatcagtgaggcacctatctcagcgatctgtctatttcgttcatccatagttgcctgactccccgtcgtgtagataactacgatacgggagggcttaccatctggccccagcgctgcgatgataccgcgagaaccacgctcaccggctccggatttatcagcaataaaccagccagccggaagggccgagcgcagaagtggtcctgcaactttatccgcctccatccagtctattaattgttgccgggaagctagagtaagtagttcgccagttaatagtttgcgcaacgttgttgccatcgctacaggcatcgtggtgtcacgctcgtcgtttggtatggcttcattcagctccggttcccaacgatcaaggcgagttacatgatcccccatgttgtgcaaaaaagcggttagctccttcggtcctccgatcgttgtcagaagtaagttggccgcagtgttatcactcatggttatggcagcactgcataattctcttactgtcatgccatccgtaagatgcttttctgtgactggtgagtactcaaccaagtcattctgagaatagtgtatgcggcgaccgagttgctcttgcccggcgtcaatacgggataataccgcgccacatagcagaactttaaaagtgctcatcattggaaaacgttcttcggggcgaaaactctcaaggatcttaccgctgttgagatccagttcgatgtaacccactcgtgcacccaactgatcttcagcatcttttactttcaccagcgtttctgggtgagcaaaaacaggaaggcaaaatgccgcaaaaaagggaataagggcgacacggaaatgttgaatactcatattcttcctttttcaatattattgaagcatttatcagggttattgtctcatgagcggatacatatttgaatgtatttagaaaaataaacaaataggggtcagtgttacaaccaattaaccaattctgaacattatcgcgagcccatttatacctgaatatggctcataacaccccttgtttgcctggcggcagtagcgcggtggtcccacctgaccccatgccgaactcagaagtgaaacgccgtagcgccgatggtagtgtggggactccccatgcgagagtagggaactgccaggcatcaaataaaacgaaaggctcagtcgaaagactgggcctttcgcccgggctaattatggggtgtcgcccttattcgactctatagtgaagttcctattctctagaaagtataggaacttctgaagtgggggcggccgcttattaccagtaaataccacgcataattgccgcaaaagcgacctgttccgtgctaactttcggtttctcaccgcttttcgaacccgctgctgccgggctgtccgggaacatacggtagccagtattcatgataatctcacccattttcggtgccaacgcgtgcagcacttgcgcaaacacacccagacgcgtcgcgatacgcttcggacggtagacaatcgcgtccgccaccatttgagccgcctcgtccggggtcagggtcggcacggagtcgtagattttggtcggcgcaatcatcggggttttgaccaacggcatgttgatcgtcgtaaaggtcacattgcggtcgctccactcagctgccgcgcaacgagagaaggcgtccagcgcgctcttgctgctaacgtatgcgctgaagcgcggtgcattggtcaagacgccaatgctgctgatgttcaccacatgaccgcgacggcgctccaacatcgcaggggcgaaacccataatcagacgcacgctgccaaagtaattcagctgcatcgtgcgctcaaaatcgtgaaaacggtcgaaagacagcgccagggaacggcgaatgctacgaccagcattgttaaccaggacatccacatggccgtgattgtccagaacggttttcacaaagcgatcgcaatcgtccatatcagagaaatcacattgataagcgtgaacgttaccacctttcgcttccaggctcgctgccacctcgtccagcgtttctttggtacgtgcaccaatgaccaggatagcacccgcctctgccagcttctcggcggtcgccaggccaataccgctggttgcgcccgtgacaacgcacaccttgccttcaacggtacctttcaacgtacggtccttaaacagatctgggtccaggttacgctcccaatagtcccagatcacaggggcgtagctcggcagacgcggaacttcgatatcggtgcccttcaaaacacgctccagctcacgagtatcgaagcgcgtcggataattgatgaaagacatgacgctcggcggaatacccatatcgtccagcagtgcacccgtgatgcgcttcactggcggcagattcttgatgctctgacggataaacggtggaatgaaaccaaacatgcggctgtcgatgcgcatacccatacgcggtgcgtggcctgcctcacagaaaatgttcaggatctcgccaactttgtatgggtcgctgtccaccagatggaaacagttgccatcctcgccttccagatgcgcaatatggtccagcgcatccacaacgaagtcgaccggaacaatattcagacgaccaccttcgataccaatggtcggcacccactgcggcagcgcgtggcggatcttttggatcattttgaagaagtaatacgggccatcaaccttatccatttcgcccgtttcgctatgaccgataaccatacccggacgatagatacggaacggaaccttgcactcttcgcggacgaccttttcgctctcgtgtttggtgcgcagatacgggtgatccagcttttcggcctcttcgaacatatcctcacgaaagatgcccttgaacagaccggctgccgcaatgctggaaacgtgatgaaagtgcttagcgcccatcgcctcggctgcctggacagcggcacgggtaccctcaatgttggtcgctgcttgcgcctcttcgtccgcacccatatcatatactgccgccaagtgaaacacgtggtcaatgttacctttcagcgatttcagggtcttggcgtcgatgcccaggttcttgctggtcaggtcgccgataacggctttgacttgtttgtcatcggcaccccaacgctcacgcaggcgttccagtttatcctgagactgttcgcgcaccaggacgtaaacggtaccgccacgggccaggagtttttcaaccagaaatctaccaatgaaacctgtaccgcctgtaagaaaatagttcatatgttttacctcctgttaaacaaaattatttctagagggaaaccgttgtggaattgtgagcgctcacaattccacatccacacaacatacgagccggaagcataaagtgtaaagcctgtcgatcactgtgcatgaagctcgtaattgttatccgctcacaattggatccaaaatgaagggaagttcctatactttctagagaataggaacttctatagggagtcgaataagggcgacacaaaaggtattctaaatgcataataaatactgataacatcttatagtttgtattatattttgtattatcgttgacatgtataattttgatatcaaaaactgattttccctttattattttcgagatttattttcttaattctctttaacaaactagaaatattgtatatacaaaaaatcataaataatagatgaatagtttaattataggtgttcatcaatcgaaaaagcaacgtatcttatttaaagtgcgttgcttttttctcatttataaggttaaataattctcatatatcaagcaaagtgacaggcgcccttaaatattctgacaaatgctctttccctaaactccccccataaaaaaacccgccgaagcgggtttttacgttatttgcggattaacgattactcgttatcagaaccgcccaggatgcctggcagttccctactctcgccgctgcgctcggtcgttcggctgcgggacctcagcgctagcggagtgtatactggcttactatgttggcactgatgagggtgtcagtgaagtgcttcatgtggcaggagaaaaaaggctgcaccggtgcgtcagcagaatatgtgatacaggatatattccgcttcctcgctcactgactcgctacgctcggtcgttcgactgcggcgagcggaaatggcttacgaacggggcggagatttcctggaagatgccaggaagatacttaacagggaagtgagagggccgcggcaaagccgtttttccataggctccgcccccctgacaagcatcacgaaatctgacgctcaaatcagtggtggcgaaacccgacaggactataaagataccaggcgtttccccctggcggctccctcgtgcgctctcctgttcctgcctttcggtttaccggtgtcattccgctgttatggccgcgtttgtctcattccacgcctgacactcagttccgggtaggcagttcgctccaagctggactgtatgcacgaaccccccgttcagtccgaccgctgcgccttatccggtaactatcgtcttgagtccaacccggaaagacatgcaaaagcaccactggcagcagccactggtaattgatttagaggagttagtcttgaagtcatgcgccggttaaggctaaactgaaaggacaagttttggtgactgcgctcctccaagccagttacctcggttcaaagagttggtagctcagagaaccttcgaaaaaccgccctgcaaggcggttttttcgttttcagagcaagagattacgcgcagaccaaaacgatctcaagaagatcatcttattaatcactgcccgctttccagtcgggaaacctgtcgtgccagctgcattaatgaatcggccaacgcgcggggagaggcggtttgcgtattgggcgccagggtggtttttcttttcaccagtgagactggcaacagctgattgcccttcaccgcctggccctgagagagttgcagcaagcggtccacgctggtttgccccagcaggcgaaaatcctgtttgatggtggttaacggcgggatataacatgagctatcttcggtatcgtcgtatcccactaccgagatatccgcaccaacgcgcagcccggactcggtaatggcgcgcattgcgcccagcgccatctgatcgttggcaaccagcatcgcagtgggaacgatgccctcattcagcatttgcatggtttgttgaaaaccggacatggcactccagtcgccttcccgttccgctatcggctgaatttgattgcgagtgagatatttatgccagccagccagacgcagacgcgccgagacagaacttaatgggcccgctaacagcgcgatttgctggtgacccaatgcgaccagatgctccacgcccagtcgcgtaccgtcctcatgggagaaaataatactgttgatgggtgtctggtcagagacatcaagaaataacgccggaacattagtgcaggcagcttccacagcaatggcatcctggtcatccagcggatagttaatgatcagcccactgacgcgttgcgcgagaagattgtgcaccgccgctttacaggcttcgacgccgcttcgttctaccatcgacaccaccacgctggcacccagttgatcggcgcgagatttaatcgccgcgacaatttgcgacggcgcgtgcagggccagactggaggtggcaacgccaatcagcaacgactgtttgcccgccagttgttgtgccacgcggttgggaatgtaattcagctccgccatcgccgcttccactttttcccgcgttttcgcagaaacgtggctggcctggttcaccacgcgggaaacggtctgataagagacaccggcatactctgcgacatcgtataacgttactggtttcatattcaccaccctgaattgactctcttccgggcgctatcatgccataccgcgaaaggttttgcgccattcgatggcgcgccgctttt

SEQ ID NO: 164 - DNA, 5669 bp, Artificial Sequence
  vector
accaatgcttaatcagtgaggcacctatctcagcgatctgtctatttcgttcatccatagttgcctgactccccgtcgtgtagataactacgatacgggagggcttaccatctggccccagcgctgcgatgataccgcgagaaccacgctcaccggctccggatttatcagcaataaaccagccagccggaagggccgagcgcagaagtggtcctgcaactttatccgcctccatccagtctattaattgttgccgggaagctagagtaagtagttcgccagttaatagtttgcgcaacgttgttgccatcgctacaggcatcgtggtgtcacgctcgtcgtttggtatggcttcattcagctccggttcccaacgatcaaggcgagttacatgatcccccatgttgtgcaaaaaagcggttagctccttcggtcctccgatcgttgtcagaagtaagttggccgcagtgttatcactcatggttatggcagcactgcataattctcttactgtcatgccatccgtaagatgcttttctgtgactggtgagtactcaaccaagtcattctgagaatagtgtatgcggcgaccgagttgctcttgcccggcgtcaatacgggataataccgcgccacatagcagaactttaaaagtgctcatcattggaaaacgttcttcggggcgaaaactctcaaggatcttaccgctgttgagatccagttcgatgtaacccactcgtgcacccaactgatcttcagcatcttttactttcaccagcgtttctgggtgagcaaaaacaggaaggcaaaatgccgcaaaaaagggaataagggcgacacggaaatgttgaatactcatattcttcctttttcaatattattgaagcatttatcagggttattgtctcatgagcggatacatatttgaatgtatttagaaaaataaacaaataggggtcagtgttacaaccaattaaccaattctgaacattatcgcgagcccatttatacctgaatatggctcataacaccccttgtttgcctggcggcagtagcgcggtggtcccacctgaccccatgccgaactcagaagtgaaacgccgtagcgccgatggtagtgtggggactccccatgcgagagtagggaactgccaggcatcaaataaaacgaaaggctcagtcgaaagactgggcctttcgcccgggctaattatggggtgtcgcccttattcgactctatagtgaagttcctattctctagaaagtataggaacttctgaagtgggggcggccgcttattactcggttttcttcttgctcaggaactctttcttcagacccggcagatgcacattgacaatgtagtgctcccagtcaatgcccttaatgtcaaaaccgaaggttttcttttcttccatgctcatctcttgaatcaggctagtcgtgttggtattatcgaagcgagcctgaaagaaggtgtacggctcgtacgttttggccaggctcacgaaatagttcagtttacgcttgcctttcgtgctcagaccaccaccctcgttatcgatcacgcgctcctgtttgataatggtattagacagcgcagacgtaaaaccttccaggctggaatgaatcttcatgtgctccaagtcaatgacggtttcttccagagggaaatcacacaggtgttgatgggacagatcgatcagtttacctgcacgcatcgggttcacgtggctgctgctcgtcaggttgtagaccttaaactccggaacaccacaaccgtgttttgccatcgcagcaatcgccgcgttcgcaaccatatcaaccgggatgatgtccatcagggactgtgggtcggcccagaaatcgctgatctgacctttcgcgtaagccaggataatcgggtccgccatacgcgtaccctgaatccagcccgggaacggttcattgtagctgctctcgatgatgctcgggcgaataatgaccaccggcagattaccgcgcttgctgtgaatgaccgcttcgccaatcgccttggtaaacgtatacgaattctcccaaccataatgctgtgcgcgctcaaaacccagctctttcagcttcttaatctcttcacggccacggaatttacgcactgcctcgcttgccagtttcagctcggatttgatgttcaggtcagaggtaatgttctcgccgatgcacagcggggtttccaagaccgtgccttcacgcttgccggtgacataagcagtggaaaagtgcaggaacagtttcaacttacggcagcctttgccgaagctcaacagacgacctggacccaaggcgttgacgctcagggccgagtcataacggtcatcaaaggtggtgcgaccaccacagctgatgataacgtcgatctcttcggagatcatgttcgcgatttcggacttgatacccaggttatcttcttcgatatcaccgataaccgggatcaatttgcgtttcatgaaggcctcataagagctgccatgcatttgcttcagcagtttgaacaggtcgctgctaatgatctcgtcgtacagacgcttattcgcgctctcttgatccttgctacgcatcagcaagaaaatcttgccaatttccaggctctcacgcagcagtttctcgatcagcaccttggccagaaaaccggttgcgccggtcaccagatagcttttgccttccaggaaacgaacaatgccaatgccgtcgctattacggctggtttcggtcttaggggtaaccaggctggtcaccgcttcaaagctggtttcaccgtaaaagcagctcgtttgaacacggcgcgtggtatggctcagacggcgacgcggcatgtagtgattcggcttgcgcgggaagctgctaaagtagctaacaccgttcaatttaaatgcgtgagaagttgccagtacattcgtcgtcgccatatgttttacctcctgttaaacaaaattatttctagagggaaaccgttgtggaattgtgagcgctcacaattccacatccacacaacatacgagccggaagcataaagtgtaaagcctgtcgatcactgtgcatgaagctcgtaattgttatccgctcacaattggatccaaaatgaagggaagttcctatactttctagagaataggaacttctatagggagtcgaataagggcgacacaaaaggtattctaaatgcataataaatactgataacatcttatagtttgtattatattttgtattatcgttgacatgtataattttgatatcaaaaactgattttccctttattattttcgagatttattttcttaattctctttaacaaactagaaatattgtatatacaaaaaatcataaataatagatgaatagtttaattataggtgttcatcaatcgaaaaagcaacgtatcttatttaaagtgcgttgcttttttctcatttataaggttaaataattctcatatatcaagcaaagtgacaggcgcccttaaatattctgacaaatgctctttccctaaactccccccataaaaaaacccgccgaagcgggtttttacgttatttgcggattaacgattactcgttatcagaaccgcccaggatgcctggcagttccctactctcgccgctgcgctcggtcgttcggctgcgggacctcagcgctagcggagtgtatactggcttactatgttggcactgatgagggtgtcagtgaagtgcttcatgtggcaggagaaaaaaggctgcaccggtgcgtcagcagaatatgtgatacaggatatattccgcttcctcgctcactgactcgctacgctcggtcgttcgactgcggcgagcggaaatggcttacgaacggggcggagatttcctggaagatgccaggaagatacttaacagggaagtgagagggccgcggcaaagccgtttttccataggctccgcccccctgacaagcatcacgaaatctgacgctcaaatcagtggtggcgaaacccgacaggactataaagataccaggcgtttccccctggcggctccctcgtgcgctctcctgttcctgcctttcggtttaccggtgtcattccgctgttatggccgcgtttgtctcattccacgcctgacactcagttccgggtaggcagttcgctccaagctggactgtatgcacgaaccccccgttcagtccgaccgctgcgccttatccggtaactatcgtcttgagtccaacccggaaagacatgcaaaagcaccactggcagcagccactggtaattgatttagaggagttagtcttgaagtcatgcgccggttaaggctaaactgaaaggacaagttttggtgactgcgctcctccaagccagttacctcggttcaaagagttggtagctcagagaaccttcgaaaaaccgccctgcaaggcggttttttcgttttcagagcaagagattacgcgcagaccaaaacgatctcaagaagatcatcttattaatcactgcccgctttccagtcgggaaacctgtcgtgccagctgcattaatgaatcggccaacgcgcggggagaggcggtttgcgtattgggcgccagggtggtttttcttttcaccagtgagactggcaacagctgattgcccttcaccgcctggccctgagagagttgcagcaagcggtccacgctggtttgccccagcaggcgaaaatcctgtttgatggtggttaacggcgggatataacatgagctatcttcggtatcgtcgtatcccactaccgagatatccgcaccaacgcgcagcccggactcggtaatggcgcgcattgcgcccagcgccatctgatcgttggcaaccagcatcgcagtgggaacgatgccctcattcagcatttgcatggtttgttgaaaaccggacatggcactccagtcgccttcccgttccgctatcggctgaatttgattgcgagtgagatatttatgccagccagccagacgcagacgcgccgagacagaacttaatgggcccgctaacagcgcgatttgctggtgacccaatgcgaccagatgctccacgcccagtcgcgtaccgtcctcatgggagaaaataatactgttgatgggtgtctggtcagagacatcaagaaataacgccggaacattagtgcaggcagcttccacagcaatggcatcctggtcatccagcggatagttaatgatcagcccactgacgcgttgcgcgagaagattgtgcaccgccgctttacaggcttcgacgccgcttcgttctaccatcgacaccaccacgctggcacccagttgatcggcgcgagatttaatcgccgcgacaatttgcgacggcgcgtgcagggccagactggaggtggcaacgccaatcagcaacgactgtttgcccgccagttgttgtgccacgcggttgggaatgtaattcagctccgccatcgccgcttccactttttcccgcgttttcgcagaaacgtggctggcctggttcaccacgcgggaaacggtctgataagagacaccggcatactctgcgacatcgtataacgttactggtttcatattcaccaccctgaattgactctcttccgggcgctatcatgccataccgcgaaaggttttgcgccattcgatggcgcgccgctttt

SEQ ID NO: 165 - DNA, 4910 bp, Artificial Sequence
  vector
accaatgcttaatcagtgaggcacctatctcagcgatctgtctatttcgttcatccatagttgcctgactccccgtcgtgtagataactacgatacgggagggcttaccatctggccccagcgctgcgatgataccgcgagaaccacgctcaccggctccggatttatcagcaataaaccagccagccggaagggccgagcgcagaagtggtcctgcaactttatccgcctccatccagtctattaattgttgccgggaagctagagtaagtagttcgccagttaatagtttgcgcaacgttgttgccatcgctacaggcatcgtggtgtcacgctcgtcgtttggtatggcttcattcagctccggttcccaacgatcaaggcgagttacatgatcccccatgttgtgcaaaaaagcggttagctccttcggtcctccgatcgttgtcagaagtaagttggccgcagtgttatcactcatggttatggcagcactgcataattctcttactgtcatgccatccgtaagatgcttttctgtgactggtgagtactcaaccaagtcattctgagaatagtgtatgcggcgaccgagttgctcttgcccggcgtcaatacgggataataccgcgccacatagcagaactttaaaagtgctcatcattggaaaacgttcttcggggcgaaaactctcaaggatcttaccgctgttgagatccagttcgatgtaacccactcgtgcacccaactgatcttcagcatcttttactttcaccagcgtttctgggtgagcaaaaacaggaaggcaaaatgccgcaaaaaagggaataagggcgacacggaaatgttgaatactcatattcttcctttttcaatattattgaagcatttatcagggttattgtctcatgagcggatacatatttgaatgtatttagaaaaataaacaaataggggtcagtgttacaaccaattaaccaattctgaacattatcgcgagcccatttatacctgaatatggctcataacaccccttgtttgcctggcggcagtagcgcggtggtcccacctgaccccatgccgaactcagaagtgaaacgccgtagcgccgatggtagtgtggggactccccatgcgagagtagggaactgccaggcatcaaataaaacgaaaggctcagtcgaaagactgggcctttcgcccgggctaattatggggtgtcgcccttattcgactctatagtgaagttcctattctctagaaagtataggaacttctgaagtgggggcggccgcttattaccagtgttcgcctgggaacaaacgtgcataggcacgttgaattaaattcaacttctcttgctcaccaacagacgcggtagaacttgggaataagttgaaaccaatcgacattaaaatgttgttaatgtctggtgcaatcgcataagtaatcgaagcaaggcgacctaagttcgtcgcgatctttttcggacgcttcacgattgcataagcaattaaatcggctgcttcttcaggtgaaagcgttggtacatatttataaattttggttggtgcaatcattggtgtgcggaccaaaggcatataaatagaggtaatcgcaattttgtgtgagtgaacttccgcagataaacaacgactaaatgcatccaatgcagctttagacgcaacgtaagcagaaaagcgagttgcgttggcaagaacaccaattgagctgatgttaatgatttgaccgtctttacgctgcatcatgtgcggtaaaacattcaagactaaacgtactgcaccaaagtaatttaactgcatggtacgttcgaagtcatggaaacgatcaactgactcatgtaccgcacgacggattgaacgtcctgcgttatttacaagaatatcaatgtgatctactgctgctaagatttcttttgaaacggcatcaatagattccatatcattgagatcacatggaaatacggtcgcttttccaccttcagcctcgatctctgctttgacctcatctaacttctctttagtacgagcgagcaataagacatgagcacctgcttgagcaaggtattttgaaaccgttaaaccaataccacttgatgctcctgtgacaatgattgttttaccgtcgactttttgctgaaaaagttttttgagttttgcattcatatgttttacctcctgttaaacaaaattatttctagagggaaaccgttgtggaattgtgagcgctcacaattccacatccacacaacatacgagccggaagcataaagtgtaaagcctgtcgatcactgtgcatgaagctcgtaattgttatccgctcacaattggatccaaaatgaagggaagttcctatactttctagagaataggaacttctatagggagtcgaataagggcgacacaaaaggtattctaaatgcataataaatactgataacatcttatagtttgtattatattttgtattatcgttgacatgtataattttgatatcaaaaactgattttccctttattattttcgagatttattttcttaattctctttaacaaactagaaatattgtatatacaaaaaatcataaataatagatgaatagtttaattataggtgttcatcaatcgaaaaagcaacgtatcttatttaaagtgcgttgcttttttctcatttataaggttaaataattctcatatatcaagcaaagtgacaggcgcccttaaatattctgacaaatgctctttccctaaactccccccataaaaaaacccgccgaagcgggtttttacgttatttgcggattaacgattactcgttatcagaaccgcccaggatgcctggcagttccctactctcgccgctgcgctcggtcgttcggctgcgggacctcagcgctagcggagtgtatactggcttactatgttggcactgatgagggtgtcagtgaagtgcttcatgtggcaggagaaaaaaggctgcaccggtgcgtcagcagaatatgtgatacaggatatattccgcttcctcgctcactgactcgctacgctcggtcgttcgactgcggcgagcggaaatggcttacgaacggggcggagatttcctggaagatgccaggaagatacttaacagggaagtgagagggccgcggcaaagccgtttttccataggctccgcccccctgacaagcatcacgaaatctgacgctcaaatcagtggtggcgaaacccgacaggactataaagataccaggcgtttccccctggcggctccctcgtgcgctctcctgttcctgcctttcggtttaccggtgtcattccgctgttatggccgcgtttgtctcattccacgcctgacactcagttccgggtaggcagttcgctccaagctggactgtatgcacgaaccccccgttcagtccgaccgctgcgccttatccggtaactatcgtcttgagtccaacccggaaagacatgcaaaagcaccactggcagcagccactggtaattgatttagaggagttagtcttgaagtcatgcgccggttaaggctaaactgaaaggacaagttttggtgactgcgctcctccaagccagttacctcggttcaaagagttggtagctcagagaaccttcgaaaaaccgccctgcaaggcggttttttcgttttcagagcaagagattacgcgcagaccaaaacgatctcaagaagatcatcttattaatcactgcccgctttccagtcgggaaacctgtcgtgccagctgcattaatgaatcggccaacgcgcggggagaggcggtttgcgtattgggcgccagggtggtttttcttttcaccagtgagactggcaacagctgattgcccttcaccgcctggccctgagagagttgcagcaagcggtccacgctggtttgccccagcaggcgaaaatcctgtttgatggtggttaacggcgggatataacatgagctatcttcggtatcgtcgtatcccactaccgagatatccgcaccaacgcgcagcccggactcggtaatggcgcgcattgcgcccagcgccatctgatcgttggcaaccagcatcgcagtgggaacgatgccctcattcagcatttgcatggtttgttgaaaaccggacatggcactccagtcgccttcccgttccgctatcggctgaatttgattgcgagtgagatatttatgccagccagccagacgcagacgcgccgagacagaacttaatgggcccgctaacagcgcgatttgctggtgacccaatgcgaccagatgctccacgcccagtcgcgtaccgtcctcatgggagaaaataatactgttgatgggtgtctggtcagagacatcaagaaataacgccggaacattagtgcaggcagcttccacagcaatggcatcctggtcatccagcggatagttaatgatcagcccactgacgcgttgcgcgagaagattgtgcaccgccgctttacaggcttcgacgccgcttcgttctaccatcgacaccaccacgctggcacccagttgatcggcgcgagatttaatcgccgcgacaatttgcgacggcgcgtgcagggccagactggaggtggcaacgccaatcagcaacgactgtttgcccgccagttgttgtgccacgcggttgggaatgtaattcagctccgccatcgccgcttccactttttcccgcgttttcgcagaaacgtggctggcctggttcaccacgcgggaaacggtctgataagagacaccggcatactctgcgacatcgtataacgttactggtttcatattcaccaccctgaattgactctcttccgggcgctatcatgccataccgcgaaaggttttgcgccattcgatggcgcgccgctttt

SEQ ID NO: 166 - DNA, 4931 bp, Artificial Sequence
  vector
aaaagcggcgcgccatcgaatggcgcaaaacctttcgcggtatggcatgatagcgcccggaagagagtcaattcagggtggtgaatatgaaaccagtaacgttatacgatgtcgcagagtatgccggtgtctcttatcagaccgtttcccgcgtggtgaaccaggccagccacgtttctgcgaaaacgcgggaaaaagtggaagcggcgatggcggagctgaattacattcccaaccgcgtggcacaacaactggcgggcaaacagtcgttgctgattggcgttgccacctccagtctggccctgcacgcgccgtcgcaaattgtcgcggcgattaaatctcgcgccgatcaactgggtgccagcgtggtggtgtcgatggtagaacgaagcggcgtcgaagcctgtaaagcggcggtgcacaatcttctcgcgcaacgcgtcagtgggctgatcattaactatccgctggatgaccaggatgccattgctgtggaagctgcctgcactaatgttccggcgttatttcttgatgtctctgaccagacacccatcaacagtattattttctcccatgaggacggtacgcgactgggcgtggagcatctggtcgcattgggtcaccagcaaatcgcgctgttagcgggcccattaagttctgtctcggcgcgtctgcgtctggctggctggcataaatatctcactcgcaatcaaattcagccgatagcggaacgggaaggcgactggagtgccatgtccggttttcaacaaaccatgcaaatgctgaatgagggcatcgttcccactgcgatgctggttgccaacgatcagatggcgctgggcgcaatgcgcgccattaccgagtccgggctgcgcgttggtgcggatatctcggtagtgggatacgacgataccgaagatagctcatgttatatcccgccgttaaccaccatcaaacaggattttcgcctgctggggcaaaccagcgtggaccgcttgctgcaactctctcagggccaggcggtgaagggcaatcagctgttgccagtctcactggtgaaaagaaaaaccaccctggcgcccaatacgcaaaccgcctctccccgcgcgttggccgattcattaatgcagctggcacgacaggtttcccgactggaaagcgggcagtgattaataagatgatcttcttgagatcgttttggtctgcgcgtaatctcttgctctgaaaacgaaaaaaccgccttgcagggcggtttttcgaaggttctctgagctaccaactctttgaaccgaggtaactggcttggaggagcgcagtcaccaaaacttgtcctttcagtttagccttaaccggcgcatgacttcaagactaactcctctaaatcaattaccagtggctgctgccagtggtgcttttgcatgtctttccgggttggactcaagacgatagttaccggataaggcgcagcggtcggactgaacggggggttcgtgcatacagtccagcttggagcgaactgcctacccggaactgagtgtcaggcgtggaatgagacaaacgcggccataacagcggaatgacaccggtaaaccgaaaggcaggaacaggagagcgcacgagggagccgccagggggaaacgcctggtatctttatagtcctgtcgggtttcgccaccactgatttgagcgtcagatttcgtgatgcttgtcaggggggcggagcctatggaaaaacggctttgccgcggccctctcacttccctgttaagtatcttcctggcatcttccaggaaatctccgccccgttcgtaagccatttccgctcgccgcagtcgaacgaccgagcgtagcgagtcagtgagcgaggaagcggaatatatcctgtatcacatattctgctgacgcaccggtgcagccttttttctcctgccacatgaagcacttcactgacaccctcatcagtgccaacatagtaagccagtatacactccgctagcgctgaggtcccgcagccgaacgaccgagcgcagcggcgagagtagggaactgccaggcatcctgggcggttctgataacgagtaatcgttaatccgcaaataacgtaaaaacccgcttcggcgggtttttttatggggggagtttagggaaagagcatttgtcagaatatttaagggcgcctgtcactttgcttgatatatgagaattatttaaccttataaatgagaaaaaagcaacgcactttaaataagatacgttgctttttcgattgatgaacacctataattaaactattcatctattatttatgattttttgtatatacaatatttctagtttgttaaagagaattaagaaaataaatctcgaaaataataaagggaaaatcagtttttgatatcaaaattatacatgtcaacgataatacaaaatataatacaaactataagatgttatcagtatttattatgcatttagaataccttttgtgtcgcccttattcgactccctatagaagttcctattctctagaaagtataggaacttcccttcattttggatccaattgtgagcggataacaattacgagcttcatgcacagtgatcgacaggctttacactttatgcttccggctcgtatgttgtgtggatgtggaattgtgagcgctcacaattccacaacggtttccctctagaaataattttgtttaacaggaggtaaaacattgatctcgatccgtgaaaaacgtgttaacaagaaattggaggccctgtttcgtgagaatgtcaaaggcaaggttgccctgatcacgggtgctagcagcggcatcggcctgacgattgccaaacgcattgctgcggcaggtgcacatgttctgttggtcgcgcgcacccaggaaaccctggaagaagtgaaggcagcaatcgagcaacagggtggccaggccagcattttcccgtgtgacctgaccgatatgaatgcgattgatcagctgagccaacagattatggcatccgtcgaccacgtagattttctgatcaacaatgccggtcgcagcattcgtcgcgcagtgcacgaaagcttcgaccgttttcatgatttcgagcgtacgatgcaattgaactacttcggtgcggtgcgtctggtcctgaacctgctgccgcacatgatcaaacgtaagaacggtcaaatcatcaatatcagcagcatcggcgtgctggcgaatgcgactcgctttagcgcgtacgttgcgagcaaagcagcgctggatgcgttttctcgttgcctgagcgcagaagttttgaaacataagattagcatcacgagcatttacatgccgttggtgcgtaccccgatgatcgccccgaccaaaatctataagtatgtgccgacgctgagcccggaagaggcagctgacctgattgtctacgctattgttaaacgtccaaagcgtattgcgacccacctgggtcgcttggcgtccatcacctacgcgattgcgccggacattaacaatattctgatgtccattggtttcaacctgttccctagctctaccgcggctctgggcgagcaggagaagctgaatctgctgcaacgtgcctatgcgcgcctgttcccgggtgagcactggtgataaggccgcccccacttcagaagttcctatactttctagagaataggaacttcactatagagtcgaataagggcgacaccccataattagcccgggcgaaaggcccagtctttcgactgagcctttcgttttatttgatgcctggcagttccctactctcgcatggggagtccccacactaccatcggcgctacggcgtttcacttctgagttcggcatggggtcaggtgggaccaccgcgctactgccgccaggcaaacaaggggtgttatgagccatattcaggtataaatgggctcgcgataatgttcagaattggttaattggttgtaacactgacccctatttgtttatttttctaaatacattcaaatatgtatccgctcatgagacaataaccctgataaatgcttcaataatattgaaaaaggaagaatatgagtattcaacatttccgtgtcgcccttattcccttttttgcggcattttgccttcctgtttttgctcacccagaaacgctggtgaaagtaaaagatgctgaagatcagttgggtgcacgagtgggttacatcgaactggatctcaacagcggtaagatccttgagagttttcgccccgaagaacgttttccaatgatgagcacttttaaagttctgctatgtggcgcggtattatcccgtattgacgccgggcaagagcaactcggtcgccgcatacactattctcagaatgacttggttgagtactcaccagtcacagaaaagcatcttacggatggcatgacagtaagagaattatgcagtgctgccataaccatgagtgataacactgcggccaacttacttctgacaacgatcggaggaccgaaggagctaaccgcttttttgcacaacatgggggatcatgtaactcgccttgatcgttgggaaccggagctgaatgaagccataccaaacgacgagcgtgacaccacgatgcctgtagcgatggcaacaacgttgcgcaaactattaactggcgaactacttactctagcttcccggcaacaattaatagactggatggaggcggataaagttgcaggaccacttctgcgctcggcccttccggctggctggtttattgctgataaatccggagccggtgagcgtggttctcgcggtatcatcgcagcgctggggccagatggtaagccctcccgtatcgtagttatctacacgacggggagtcaggcaactatggatgaacgaaatagacagatcgctgagataggtgcctcactgattaagcattggt

SEQ ID NO: 167 - DNA, 4907 bp, Artificial Sequence
  vector
aaaagcggcgcgccatcgaatggcgcaaaacctttcgcggtatggcatgatagcgcccggaagagagtcaattcagggtggtgaatatgaaaccagtaacgttatacgatgtcgcagagtatgccggtgtctcttatcagaccgtttcccgcgtggtgaaccaggccagccacgtttctgcgaaaacgcgggaaaaagtggaagcggcgatggcggagctgaattacattcccaaccgcgtggcacaacaactggcgggcaaacagtcgttgctgattggcgttgccacctccagtctggccctgcacgcgccgtcgcaaattgtcgcggcgattaaatctcgcgccgatcaactgggtgccagcgtggtggtgtcgatggtagaacgaagcggcgtcgaagcctgtaaagcggcggtgcacaatcttctcgcgcaacgcgtcagtgggctgatcattaactatccgctggatgaccaggatgccattgctgtggaagctgcctgcactaatgttccggcgttatttcttgatgtctctgaccagacacccatcaacagtattattttctcccatgaggacggtacgcgactgggcgtggagcatctggtcgcattgggtcaccagcaaatcgcgctgttagcgggcccattaagttctgtctcggcgcgtctgcgtctggctggctggcataaatatctcactcgcaatcaaattcagccgatagcggaacgggaaggcgactggagtgccatgtccggttttcaacaaaccatgcaaatgctgaatgagggcatcgttcccactgcgatgctggttgccaacgatcagatggcgctgggcgcaatgcgcgccattaccgagtccgggctgcgcgttggtgcggatatctcggtagtgggatacgacgataccgaagatagctcatgttatatcccgccgttaaccaccatcaaacaggattttcgcctgctggggcaaaccagcgtggaccgcttgctgcaactctctcagggccaggcggtgaagggcaatcagctgttgccagtctcactggtgaaaagaaaaaccaccctggcgcccaatacgcaaaccgcctctccccgcgcgttggccgattcattaatgcagctggcacgacaggtttcccgactggaaagcgggcagtgattaataagatgatcttcttgagatcgttttggtctgcgcgtaatctcttgctctgaaaacgaaaaaaccgccttgcagggcggtttttcgaaggttctctgagctaccaactctttgaaccgaggtaactggcttggaggagcgcagtcaccaaaacttgtcctttcagtttagccttaaccggcgcatgacttcaagactaactcctctaaatcaattaccagtggctgctgccagtggtgcttttgcatgtctttccgggttggactcaagacgatagttaccggataaggcgcagcggtcggactgaacggggggttcgtgcatacagtccagcttggagcgaactgcctacccggaactgagtgtcaggcgtggaatgagacaaacgcggccataacagcggaatgacaccggtaaaccgaaaggcaggaacaggagagcgcacgagggagccgccagggggaaacgcctggtatctttatagtcctgtcgggtttcgccaccactgatttgagcgtcagatttcgtgatgcttgtcaggggggcggagcctatggaaaaacggctttgccgcggccctctcacttccctgttaagtatcttcctggcatcttccaggaaatctccgccccgttcgtaagccatttccgctcgccgcagtcgaacgaccgagcgtagcgagtcagtgagcgaggaagcggaatatatcctgtatcacatattctgctgacgcaccggtgcagccttttttctcctgccacatgaagcacttcactgacaccctcatcagtgccaacatagtaagccagtatacactccgctagcgctgaggtcccgcagccgaacgaccgagcgcagcggcgagagtagggaactgccaggcatcctgggcggttctgataacgagtaatcgttaatccgcaaataacgtaaaaacccgcttcggcgggtttttttatggggggagtttagggaaagagcatttgtcagaatatttaagggcgcctgtcactttgcttgatatatgagaattatttaaccttataaatgagaaaaaagcaacgcactttaaataagatacgttgctttttcgattgatgaacacctataattaaactattcatctattatttatgattttttgtatatacaatatttctagtttgttaaagagaattaagaaaataaatctcgaaaataataaagggaaaatcagtttttgatatcaaaattatacatgtcaacgataatacaaaatataatacaaactataagatgttatcagtatttattatgcatttagaataccttttgtgtcgcccttattcgactccctatagaagttcctattctctagaaagtataggaacttcccttcattttggatccaattgtgagcggataacaattacgagcttcatgcacagtgatcgacaggctttacactttatgcttccggctcgtatgttgtgtggatgtggaattgtgagcgctcacaattccacaacggtttccctctagaaataattttgtttaacaggaggtaaaacagtgaacaaaaaacttgaagctctcttccgagagaatgtaaaaggtaaagtggctttgatcactggtgcatctagtggaatcggtttgacgattgcaaaaagaattgctgcggcaggtgctcatgtattattggttgcccgaacccaagaaacactggaagaagtgaaagctgcaattgaacagcaagggggacaggcctctatttttccttgtgacctgactgacatgaatgcgattgaccagttatcacaacaaattatggccagtgtcgatcatgtcgatttcctgatcaataatgcagggcgttcgattcgccgtgccgtacacgagtcgtttgatcgcttccatgattttgaacgcaccatgcagctgaattactttggtgcggtacgtttagtgttaaatttactgccacatatgattaagcgtaaaaatggccagatcatcaatatcagctctattggtgtattggccaatgcgacccgtttttctgcttatgtcgcgtctaaagctgcgctggatgccttcagtcgctgtctttcagccgaggtactcaagcataaaatctcaattacctcgatttatatgccattggtgcgtaccccaatgatcgcacccaccaaaatttataaatacgtgcccacgctttccccagaagaagccgcagatctcattgtctacgccattgtgaaacgtccaaaacgtattgcgacgcacttgggtcgtctggcgtcaattacctatgccatcgcaccagacatcaataatattctgatgtcgattggatttaacctattcccaagctcaacggctgcactgggtgaacaggaaaaattgaatctgctacaacgtgcctatgcccgcttgttcccaggcgaacactggtaataaggccgcccccacttcagaagttcctatactttctagagaataggaacttcactatagagtcgaataagggcgacaccccataattagcccgggcgaaaggcccagtctttcgactgagcctttcgttttatttgatgcctggcagttccctactctcgcatggggagtccccacactaccatcggcgctacggcgtttcacttctgagttcggcatggggtcaggtgggaccaccgcgctactgccgccaggcaaacaaggggtgttatgagccatattcaggtataaatgggctcgcgataatgttcagaattggttaattggttgtaacactgacccctatttgtttatttttctaaatacattcaaatatgtatccgctcatgagacaataaccctgataaatgcttcaataatattgaaaaaggaagaatatgagtattcaacatttccgtgtcgcccttattcccttttttgcggcattttgccttcctgtttttgctcacccagaaacgctggtgaaagtaaaagatgctgaagatcagttgggtgcacgagtgggttacatcgaactggatctcaacagcggtaagatccttgagagttttcgccccgaagaacgttttccaatgatgagcacttttaaagttctgctatgtggcgcggtattatcccgtattgacgccgggcaagagcaactcggtcgccgcatacactattctcagaatgacttggttgagtactcaccagtcacagaaaagcatcttacggatggcatgacagtaagagaattatgcagtgctgccataaccatgagtgataacactgcggccaacttacttctgacaacgatcggaggaccgaaggagctaaccgcttttttgcacaacatgggggatcatgtaactcgccttgatcgttgggaaccggagctgaatgaagccataccaaacgacgagcgtgacaccacgatgcctgtagcgatggcaacaacgttgcgcaaactattaactggcgaactacttactctagcttcccggcaacaattaatagactggatggaggcggataaagttgcaggaccacttctgcgctcggcccttccggctggctggtttattgctgataaatccggagccggtgagcgtggttctcgcggtatcatcgcagcgctggggccagatggtaagccctcccgtatcgtagttatctacacgacggggagtcaggcaactatggatgaacgaaatagacagatcgctgagataggtgcctcactgattaagcattggt

SEQ ID NO: 168 - DNA, 1272 bp, Jeotgalicoccus sp. ATCC 8456
  CDS (1)..(1272)
atggcgaccctgaagcgtgacaaaggcctggataataccctgaaagttttgaagcaaggttacctgtatacgaccaatcagcgcaaccgtctgaatacctccgttttccaaacgaaagctctgggcggcaagccgttcgttgttgttaccggcaaagagggtgcggaaatgttctacaacaatgacgtggttcagcgcgaaggtatgctgccgaagcgcatcgtcaacacgttgtttggcaagggcgccatccacaccgtggacggtaagaaacacgtcgatcgtaaggcactgtttatgagcctgatgaccgaaggtaacctgaattacgtccgtgaactgacccgtactctgtggcacgcaaatacccaacgtatggaatcgatggatgaggtcaacatctatcgcgaaagcattgtcctgttgacgaaagtcggtacccgctgggcgggtgtgcaggctccgcctgaggacatcgagcgtattgcaacggatatggacatcatgatcgatagcttccgtgccctgggcggtgccttcaaaggttacaaagccagcaaagaagctcgtcgtcgcgtggaggactggctggaggagcagatcattgaaacccgtaagggtaacatccatccgccggagggtacggcgttgtacgaattcgcgcactgggaggattacctgggcaatccaatggactcccgtacgtgcgcaattgatctgatgaatacctttcgtccactgattgcgattaaccgtttcgtgagctttggtctgcatgcgatgaacgagaacccgattacccgcgagaaaatcaagagcgagccggactatgcgtacaaatttgcgcaagaggtccgtcgttactatccgtttgtgccgttcctgccgggcaaggccaaagttgatattgacttccaaggtgtgaccattccggcaggcgttggcctggcgctggacgtgtacggtaccacgcatgatgaaagcctgtgggacgatccgaacgaatttcgtccggagcgcttcgaaacgtgggacggttctccgttcgatttgattccgcagggtggcggtgactattggacgaaccaccgttgtgcgggtgagtggattactgtgatcatcatggaggagactatgaagtattttgcagagaagatcacctacgatgttcctgaacaggacttggaggtggacctgaatagcattccgggctatgttaaaagcggttttgtcatcaagaatgttcgcgaagtcgtggatcgcacctaatga

SEQ ID NO: 169 - protein, 422 aa, Jeotgalicoccus sp. ATCC 8456
MATLKRDKGLDNTLKVLKQGYLYTTNQRNRLNTSVFQTKALGGKPFVVVTGKEGAEMFYNNDVVQREGMLPKRIVNTLFGKGAIHTVDGKKHVDRKALFMSLMTEGNLNYVRELTRTLWHANTQRMESMDEVNIYRESIVLLTKVGTRWAGVQAPPEDIERIATDMDIMIDSFRALGGAFKGYKASKEARRRVEDWLEEQIIETRKGNIHPPEGTALYEFAHWEDYLGNPMDSRTCAIDLMNTFRPLIAINRFVSFGLHAMNENPITREKIKSEPDYAYKFAQEVRRYYPFVPFLPGKAKVDIDFQGVTIPAGVGLALDVYGTTHDESLWDDPNEFRPERFETWDGSPFDLIPQGGGDYWTNHRCAGEWITVIIMEETMKYFAEKITYDVPEQDLEVDLNSIPGYVKSGFVIKNVREVVDRT

SEQ ID NO: 170 - DNA, 1425 bp, Artificial Sequence
  cassette
ggcagtgagcgcaacgcaattaatgtaagttagctcactcattaggcaccccaggcttgacactttatgcttccggctcgtataatgtgtggaattgtgagcggataacaataacaatttcacacaggatctaggaaccaaggagagtggcatatggcgaccctgaagcgtgacaaaggcctggataataccctgaaagttttgaagcaaggttacctgtatacgaccaatcagcgcaaccgtctgaatacctccgttttccaaacgaaagctctgggcggcaagccgttcgttgttgttaccggcaaagagggtgcggaaatgttctacaacaatgacgtggttcagcgcgaaggtatgctgccgaagcgcatcgtcaacacgttgtttggcaagggcgccatccacaccgtggacggtaagaaacacgtcgatcgtaaggcactgtttatgagcctgatgaccgaaggtaacctgaattacgtccgtgaactgacccgtactctgtggcacgcaaatacccaacgtatggaatcgatggatgaggtcaacatctatcgcgaaagcattgtcctgttgacgaaagtcggtacccgctgggcgggtgtgcaggctccgcctgaggacatcgagcgtattgcaacggatatggacatcatgatcgatagcttccgtgccctgggcggtgccttcaaaggttacaaagccagcaaagaagctcgtcgtcgcgtggaggactggctggaggagcagatcattgaaacccgtaagggtaacatccatccgccggagggtacggcgttgtacgaattcgcgcactgggaggattacctgggcaatccaatggactcccgtacgtgcgcaattgatctgatgaatacctttcgtccactgattgcgattaaccgtttcgtgagctttggtctgcatgcgatgaacgagaacccgattacccgcgagaaaatcaagagcgagccggactatgcgtacaaatttgcgcaagaggtccgtcgttactatccgtttgtgccgttcctgccgggcaaggccaaagttgatattgacttccaaggtgtgaccattccggcaggcgttggcctggcgctggacgtgtacggtaccacgcatgatgaaagcctgtgggacgatccgaacgaatttcgtccggagcgcttcgaaacgtgggacggttctccgttcgatttgattccgcagggtggcggtgactattggacgaaccaccgttgtgcgggtgagtggattactgtgatcatcatggaggagactatgaagtattttgcagagaagatcacctacgatgttcctgaacaggacttggaggtggacctgaatagcattccgggctatgttaaaagcggttttgtcatcaagaatgttcgcgaagtcgtggatcgcacctaatga

SEQ ID NO: 171 - DNA, 2160 bp, Artificial Sequence
  cassette
ggcagtgagcgcaacgcaattaatgtaagttagctcactcattaggcaccccaggcttgacactttatgcttccggctcgtataatgtgtggaattgtgagcggataacaataacaatttcacacaggatctaggaaccaaggagagtggcatatggcgaccctgaagcgtgacaaaggcctggataataccctgaaagttttgaagcaaggttacctgtatacgaccaatcagcgcaaccgtctgaatacctccgttttccaaacgaaagctctgggcggcaagccgttcgttgttgttaccggcaaagagggtgcggaaatgttctacaacaatgacgtggttcagcgcgaaggtatgctgccgaagcgcatcgtcaacacgttgtttggcaagggcgccatccacaccgtggacggtaagaaacacgtcgatcgtaaggcactgtttatgagcctgatgaccgaaggtaacctgaattacgtccgtgaactgacccgtactctgtggcacgcaaatacccaacgtatggaatcgatggatgaggtcaacatctatcgcgaaagcattgtcctgttgacgaaagtcggtacccgctgggcgggtgtgcaggctccgcctgaggacatcgagcgtattgcaacggatatggacatcatgatcgatagcttccgtgccctgggcggtgccttcaaaggttacaaagccagcaaagaagctcgtcgtcgcgtggaggactggctggaggagcagatcattgaaacccgtaagggtaacatccatccgccggagggtacggcgttgtacgaattcgcgcactgggaggattacctgggcaatccaatggactcccgtacgtgcgcaattgatctgatgaatacctttcgtccactgattgcgattaaccgtttcgtgagctttggtctgcatgcgatgaacgagaacccgattacccgcgagaaaatcaagagcgagccggactatgcgtacaaatttgcgcaagaggtccgtcgttactatccgtttgtgccgttcctgccgggcaaggccaaagttgatattgacttccaaggtgtgaccattccggcaggcgttggcctggcgctggacgtgtacggtaccacgcatgatgaaagcctgtgggacgatccgaacgaatttcgtccggagcgcttcgaaacgtgggacggttctccgttcgatttgattccgcagggtggcggtgactattggacgaaccaccgttgtgcgggtgagtggattactgtgatcatcatggaggagactatgaagtattttgcagagaagatcacctacgatgttcctgaacaggacttggaggtggacctgaatagcattccgggctatgttaaaagcggttttgtcatcaagaatgttcgcgaagtcgtggatcgcacctaatgacaatttcacacaggatctaggaaccaaggagagtggcatgtgagtttttctaattataaagtaatcgcgatgccggtgttggttgctaattttgttttgggggcggccactgcatgggcgaatgaaaattatccggcgaaatctgctggctataatcagggtgactgggtcgctagcttcaatttttctaaggtctatgtgggtgaggagcttggcgatctaaatgttggagggggggctttgccaaatgctgatgtaagtattggtaatgatacaacacttacgtttgatatcgcctattttgttagctcaaatatagcggtggatttttttgttggggtgccagctagggctaaatttcaaggtgagaaatcaatctcctcgctgggaagagtcagtgaagttgattacggccctgcaattctttcgcttcaatatcattacgatagctttgagcgactttatccatatgttggggttggtgttggtcgggtgctattttttgataaaaccgacggtgctttgagttcgtttgatattaaggataaatgggcgcctgcttttcaggttggccttagatatgaccttggtaactcatggatgctaaattcagatgtgcgttatattcctttcaaaacggacgtcacaggtactcttggcccggttcctgtttctactaaaattgaggttgatcctttcattctcagtcttggtgcgtcatatgttttctaataa

SEQ ID NO: 172 - DNA, 50 bp, Artificial Sequence
  terminator
tagtcaaaagcctccggtcggaggcttttgactttctgcttactgaattt

SEQ ID NO: 173 - DNA, 5103 bp, Artificial Sequence
  vector
ggccgcataatgcttaagtcgaacagaaagtaatcgtattgtacacggccgcataatcgaaattaatacgactcactataggggaattgtgagcggataacaattccccatcttagtatattagttaagtataagaaggagatatacatatggcagatctcaattggatatcggccggccacgcgatcgctgacgtcggtaccctcgagtctggtaaagaaaccgctgctgcgaaatttgaacgccagcacatggactcgtctactagcgcagcttaattaacctaggctgctgccaccgctgagcaataactagcataaccccttggggcctctaaacgggtcttgaggggttttttgctgaaacctcaggcatttgagaagcacacggtcacactgcttccggtagtcaataaaccggtaaaccagcaatagacataagcggctatttaacgaccctgccctgaaccgacgaccgggtcatcgtggccggatcttgcggcccctcggcttgaacgaattgttagacattatttgccgactaccttggtgatctcgcctttcacgtagtggacaaattcttccaactgatctgcgcgcgaggccaagcgatcttcttcttgtccaagataagcctgtctagcttcaagtatgacgggctgatactgggccggcaggcgctccattgcccagtcggcagcgacatccttcggcgcgattttgccggttactgcgctgtaccaaatgcgggacaacgtaagcactacatttcgctcatcgccagcccagtcgggcggcgagttccatagcgttaaggtttcatttagcgcctcaaatagatcctgttcaggaaccggatcaaagagttcctccgccgctggacctaccaaggcaacgctatgttctcttgcttttgtcagcaagatagccagatcaatgtcgatcgtggctggctcgaagatacctgcaagaatgtcattgcgctgccattctccaaattgcagttcgcgcttagctggataacgccacggaatgatgtcgtcgtgcacaacaatggtgacttctacagcgcggagaatctcgctctctccaggggaagccgaagtttccaaaaggtcgttgatcaaagctcgccgcgttgtttcatcaagccttacggtcaccgtaaccagcaaatcaatatcactgtgtggcttcaggccgccatccactgcggagccgtacaaatgtacggccagcaacgtcggttcgagatggcgctcgatgacgccaactacctctgatagttgagtcgatacttcggcgatcaccgcttccctcatactcttcctttttcaatattattgaagcatttatcagggttattgtctcatgagcggatacatatttgaatgtatttagaaaaataaacaaatagctagctcactcggtcgctacgctccgggcgtgagactgcggcgggcgctgcggacacatacaaagttacccacagattccgtggataagcaggggactaacatgtgaggcaaaacagcagggccgcgccggtggcgtttttccataggctccgccctcctgccagagttcacataaacagacgcttttccggtgcatctgtgggagccgtgaggctcaaccatgaatctgacagtacgggcgaaacccgacaggacttaaagatccccaccgtttccggcgggtcgctccctcttgcgctctcctgttccgaccctgccgtttaccggatacctgttccgcctttctcccttacgggaagtgtggcgctttctcatagctcacacactggtatctcggctcggtgtaggtcgttcgctccaagctgggctgtaagcaagaactccccgttcagcccgactgctgcgccttatccggtaactgttcacttgagtccaacccggaaaagcacggtaaaacgccactggcagcagccattggtaactgggagttcgcagaggatttgtttagctaaacacgcggttgctcttgaagtgtgcgccaaagtccggctacactggaaggacagatttggttgctgtgctctgcgaaagccagttaccacggttaagcagttccccaactgacttaaccttcgatcaaaccacctccccaggtggttttttcgtttacagggcaaaagattacgcgcagaaaaaaaggatctcaagaagatcctttgatcttttctactgaaccgctctagatttcagtgcaatttatctcttcaaatgtagcacctgaagtcagccccatacgatataagttgtaattctcatgttagtcatgccccgcgcccaccggaaggagctgactgggttgaaggctctcaagggcatcggtcgagatcccggtgcctaatgagtgagctaacttacattaattgcgttgcgctcactgcccgctttccagtcgggaaacctgtcgtgccagctgcattaatgaatcggccaacgcgcggggagaggcggtttgcgtattgggcgccagggtggtttttcttttcaccagtgagacgggcaacagctgattgcccttcaccgcctggccctgagagagttgcagcaagcggtccacgctggtttgccccagcaggcgaaaatcctgtttgatggtggttaacggcgggatataacatgagctgtcttcggtatcgtcgtatcccactaccgagatgtccgcaccaacgcgcagcccggactcggtaatggcgcgcattgcgcccagcgccatctgatcgttggcaaccagcatcgcagtgggaacgatgccctcattcagcatttgcatggtttgttgaaaaccggacatggcactccagtcgccttcccgttccgctatcggctgaatttgattgcgagtgagatatttatgccagccagccagacgcagacgcgccgagacagaacttaatgggcccgctaacagcgcgatttgctggtgacccaatgcgaccagatgctccacgcccagtcgcgtaccgtcttcatgggagaaaataatactgttgatgggtgtctggtcagagacatcaagaaataacgccggaacattagtgcaggcagcttccacagcaatggcatcctggtcatccagcggatagttaatgatcagcccactgacgcgttgcgcgagaagattgtgcaccgccgctttacaggcttcgacgccgcttcgttctaccatcgacaccaccacgctggcacccagttgatcggcgcgagatttaatcgccgcgacaatttgcgacggcgcgtgcagggccagactggaggtggcaacgccaatcagcaacgactgtttgcccgccagttgttgtgccacgcggttgggaatgtaattcagctccgccatcgccgcttccactttttcccgcgttttcgcagaaacgtggctggcctggttcaccacgcgggaaacggtctgataagagacaccggcatactctgcgacatcgtataacgttactggtttcacattcaccaccctgaattgactctcttccgggcgctatcatgccataccgcgaaaggttttgcgccattcgatggtgtccgggatctcgacgctctcccttatgcgactcctgcattaggggctcatagatatgcgggcagtgagcgcaacgcaattaatgtaagttagctcactcattaggcaccccaggcttgacactttatgcttccggctcgtataatgtgtggaattgtgagcggataacaataacaatttcacacaggatctaggaaccaaggagagtggcatatggcgaccctgaagcgtgacaaaggcctggataataccctgaaagttttgaagcaaggttacctgtatacgaccaatcagcgcaaccgtctgaatacctccgttttccaaacgaaagctctgggcggcaagccgttcgttgttgttaccggcaaagagggtgcggaaatgttctacaacaatgacgtggttcagcgcgaaggtatgctgccgaagcgcatcgtcaacacgttgtttggcaagggcgccatccacaccgtggacggtaagaaacacgtcgatcgtaaggcactgtttatgagcctgatgaccgaaggtaacctgaattacgtccgtgaactgacccgtactctgtggcacgcaaatacccaacgtatggaatcgatggatgaggtcaacatctatcgcgaaagcattgtcctgttgacgaaagtcggtacccgctgggcgggtgtgcaggctccgcctgaggacatcgagcgtattgcaacggatatggacatcatgatcgatagcttccgtgccctgggcggtgccttcaaaggttacaaagccagcaaagaagctcgtcgtcgcgtggaggactggctggaggagcagatcattgaaacccgtaagggtaacatccatccgccggagggtacggcgttgtacgaattcgcgcactgggaggattacctgggcaatccaatggactcccgtacgtgcgcaattgatctgatgaatacctttcgtccactgattgcgattaaccgtttcgtgagctttggtctgcatgcgatgaacgagaacccgattacccgcgagaaaatcaagagcgagccggactatgcgtacaaatttgcgcaagaggtccgtcgttactatccgtttgtgccgttcctgccgggcaaggccaaagttgatattgacttccaaggtgtgaccattccggcaggcgttggcctggcgctggacgtgtacggtaccacgcatgatgaaagcctgtgggacgatccgaacgaatttcgtccggagcgcttcgaaacgtgggacggttctccgttcgatttgattccgcagggtggcggtgactattggacgaaccaccgttgtgcgggtgagtggattactgtgatcatcatggaggagactatgaagtattttgcagagaagatcacctacgatgttcctgaacaggacttggaggtggacctgaatagcattccgggctatgttaaaagcggttttgtcatcaagaatgttcgcgaagtcgtggatcgcacctaatgatagtcaaaagcctccggtcggaggcttttgactttctgcttactgaatttgc

SEQ ID NO: 174 - DNA, 5838 bp, Artificial Sequence
  vector
ggccgcataatgcttaagtcgaacagaaagtaatcgtattgtacacggccgcataatcgaaattaatacgactcactataggggaattgtgagcggataacaattccccatcttagtatattagttaagtataagaaggagatatacatatggcagatctcaattggatatcggccggccacgcgatcgctgacgtcggtaccctcgagtctggtaaagaaaccgctgctgcgaaatttgaacgccagcacatggactcgtctactagcgcagcttaattaacctaggctgctgccaccgctgagcaataactagcataaccccttggggcctctaaacgggtcttgaggggttttttgctgaaacctcaggcatttgagaagcacacggtcacactgcttccggtagtcaataaaccggtaaaccagcaatagacataagcggctatttaacgaccctgccctgaaccgacgaccgggtcatcgtggccggatcttgcggcccctcggcttgaacgaattgttagacattatttgccgactaccttggtgatctcgcctttcacgtagtggacaaattcttccaactgatctgcgcgcgaggccaagcgatcttcttcttgtccaagataagcctgtctagcttcaagtatgacgggctgatactgggccggcaggcgctccattgcccagtcggcagcgacatccttcggcgcgattttgccggttactgcgctgtaccaaatgcgggacaacgtaagcactacatttcgctcatcgccagcccagtcgggcggcgagttccatagcgttaaggtttcatttagcgcctcaaatagatcctgttcaggaaccggatcaaagagttcctccgccgctggacctaccaaggcaacgctatgttctcttgcttttgtcagcaagatagccagatcaatgtcgatcgtggctggctcgaagatacctgcaagaatgtcattgcgctgccattctccaaattgcagttcgcgcttagctggataacgccacggaatgatgtcgtcgtgcacaacaatggtgacttctacagcgcggagaatctcgctctctccaggggaagccgaagtttccaaaaggtcgttgatcaaagctcgccgcgttgtttcatcaagccttacggtcaccgtaaccagcaaatcaatatcactgtgtggcttcaggccgccatccactgcggagccgtacaaatgtacggccagcaacgtcggttcgagatggcgctcgatgacgccaactacctctgatagttgagtcgatacttcggcgatcaccgcttccctcatactcttcctttttcaatattattgaagcatttatcagggttattgtctcatgagcggatacatatttgaatgtatttagaaaaataaacaaatagctagctcactcggtcgctacgctccgggcgtgagactgcggcgggcgctgcggacacatacaaagttacccacagattccgtggataagcaggggactaacatgtgaggcaaaacagcagggccgcgccggtggcgtttttccataggctccgccctcctgccagagttcacataaacagacgcttttccggtgcatctgtgggagccgtgaggctcaaccatgaatctgacagtacgggcgaaacccgacaggacttaaagatccccaccgtttccggcgggtcgctccctcttgcgctctcctgttccgaccctgccgtttaccggatacctgttccgcctttctcccttacgggaagtgtggcgctttctcatagctcacacactggtatctcggctcggtgtaggtcgttcgctccaagctgggctgtaagcaagaactccccgttcagcccgactgctgcgccttatccggtaactgttcacttgagtccaacccggaaaagcacggtaaaacgccactggcagcagccattggtaactgggagttcgcagaggatttgtttagctaaacacgcggttgctcttgaagtgtgcgccaaagtccggctacactggaaggacagatttggttgctgtgctctgcgaaagccagttaccacggttaagcagttccccaactgacttaaccttcgatcaaaccacctccccaggtggttttttcgtttacagggcaaaagattacgcgcagaaaaaaaggatctcaagaagatcctttgatcttttctactgaaccgctctagatttcagtgcaatttatctcttcaaatgtagcacctgaagtcagccccatacgatataagttgtaattctcatgttagtcatgccccgcgcccaccggaaggagctgactgggttgaaggctctcaagggcatcggtcgagatcccggtgcctaatgagtgagctaacttacattaattgcgttgcgctcactgcccgctttccagtcgggaaacctgtcgtgccagctgcattaatgaatcggccaacgcgcggggagaggcggtttgcgtattgggcgccagggtggtttttcttttcaccagtgagacgggcaacagctgattgcccttcaccgcctggccctgagagagttgcagcaagcggtccacgctggtttgccccagcaggcgaaaatcctgtttgatggtggttaacggcgggatataacatgagctgtcttcggtatcgtcgtatcccactaccgagatgtccgcaccaacgcgcagcccggactcggtaatggcgcgcattgcgcccagcgccatctgatcgttggcaaccagcatcgcagtgggaacgatgccctcattcagcatttgcatggtttgttgaaaaccggacatggcactccagtcgccttcccgttccgctatcggctgaatttgattgcgagtgagatatttatgccagccagccagacgcagacgcgccgagacagaacttaatgggcccgctaacagcgcgatttgctggtgacccaatgcgaccagatgctccacgcccagtcgcgtaccgtcttcatgggagaaaataatactgttgatgggtgtctggtcagagacatcaagaaataacgccggaacattagtgcaggcagcttccacagcaatggcatcctggtcatccagcggatagttaatgatcagcccactgacgcgttgcgcgagaagattgtgcaccgccgctttacaggcttcgacgccgcttcgttctaccatcgacaccaccacgctggcacccagttgatcggcgcgagatttaatcgccgcgacaatttgcgacggcgcgtgcagggccagactggaggtggcaacgccaatcagcaacgactgtttgcccgccagttgttgtgccacgcggttgggaatgtaattcagctccgccatcgccgcttccactttttcccgcgttttcgcagaaacgtggctggcctggttcaccacgcgggaaacggtctgataagagacaccggcatactctgcgacatcgtataacgttactggtttcacattcaccaccctgaattgactctcttccgggcgctatcatgccataccgcgaaaggttttgcgccattcgatggtgtccgggatctcgacgctctcccttatgcgactcctgcattaggggctcatagatatgcgggcagtgagcgcaacgcaattaatgtaagttagctcactcattaggcaccccaggcttgacactttatgcttccggctcgtataatgtgtggaattgtgagcggataacaataacaatttcacacaggatctaggaaccaaggagagtggcatatggcgaccctgaagcgtgacaaaggcctggataataccctgaaagttttgaagcaaggttacctgtatacgaccaatcagcgcaaccgtctgaatacctccgttttccaaacgaaagctctgggcggcaagccgttcgttgttgttaccggcaaagagggtgcggaaatgttctacaacaatgacgtggttcagcgcgaaggtatgctgccgaagcgcatcgtcaacacgttgtttggcaagggcgccatccacaccgtggacggtaagaaacacgtcgatcgtaaggcactgtttatgagcctgatgaccgaaggtaacctgaattacgtccgtgaactgacccgtactctgtggcacgcaaatacccaacgtatggaatcgatggatgaggtcaacatctatcgcgaaagcattgtcctgttgacgaaagtcggtacccgctgggcgggtgtgcaggctccgcctgaggacatcgagcgtattgcaacggatatggacatcatgatcgatagcttccgtgccctgggcggtgccttcaaaggttacaaagccagcaaagaagctcgtcgtcgcgtggaggactggctggaggagcagatcattgaaacccgtaagggtaacatccatccgccggagggtacggcgttgtacgaattcgcgcactgggaggattacctgggcaatccaatggactcccgtacgtgcgcaattgatctgatgaatacctttcgtccactgattgcgattaaccgtttcgtgagctttggtctgcatgcgatgaacgagaacccgattacccgcgagaaaatcaagagcgagccggactatgcgtacaaatttgcgcaagaggtccgtcgttactatccgtttgtgccgttcctgccgggcaaggccaaagttgatattgacttccaaggtgtgaccattccggcaggcgttggcctggcgctggacgtgtacggtaccacgcatgatgaaagcctgtgggacgatccgaacgaatttcgtccggagcgcttcgaaacgtgggacggttctccgttcgatttgattccgcagggtggcggtgactattggacgaaccaccgttgtgcgggtgagtggattactgtgatcatcatggaggagactatgaagtattttgcagagaagatcacctacgatgttcctgaacaggacttggaggtggacctgaatagcattccgggctatgttaaaagcggttttgtcatcaagaatgttcgcgaagtcgtggatcgcacctaatgacaatttcacacaggatctaggaaccaaggagagtggcatgtgagtttttctaattataaagtaatcgcgatgccggtgttggttgctaattttgttttgggggcggccactgcatgggcgaatgaaaattatccggcgaaatctgctggctataatcagggtgactgggtcgctagcttcaatttttctaaggtctatgtgggtgaggagcttggcgatctaaatgttggagggggggctttgccaaatgctgatgtaagtattggtaatgatacaacacttacgtttgatatcgcctattttgttagctcaaatatagcggtggatttttttgttggggtgccagctagggctaaatttcaaggtgagaaatcaatctcctcgctgggaagagtcagtgaagttgattacggccctgcaattctttcgcttcaatatcattacgatagctttgagcgactttatccatatgttggggttggtgttggtcgggtgctattttttgataaaaccgacggtgctttgagttcgtttgatattaaggataaatgggcgcctgcttttcaggttggccttagatatgaccttggtaactcatggatgctaaattcagatgtgcgttatattcctttcaaaacggacgtcacaggtactcttggcccggttcctgtttctactaaaattgaggttgatcctttcattctcagtcttggtgcgtcatatgttttctaataatagtcaaaagcctccggtcggaggcttttgactttctgcttactgaatttgc
